(19) United States
(12) Patent Application Publication
(10) Pub. No.: US 2005/0214780 A1
(43) Pub. Date: Sep. 29, 2005

(54) Human type II diabetes gene - Kv channel-interacting protein (KChIP1) located on chromosome 5

(75) Inventors: Inga Reynisdottir, Reykjavik (IS); Jeffrey R. Gulcher, Lake Barrington, IL (US); Struan F. Grant, Reykjavik (IS); Gudmar Thorleifsson, Reykjavik (IS)

Correspondence Address: HAMILTON, BROOK, SMITH & REYNOLDS, P.C., 530 VIRGINIA ROAD, P.O. BOX 9133, CONCORD, MA, 01742-9133, US

(73) Assignee: deCODE genetics ehf., Reykjavik (IS)

(21) Appl. No.: 10/820,226

(22) Filed: Apr. 7, 2004

Related U.S. Application Data
(63) Continuation-in-part of application No. PCT/US03/34681, filed on Oct. 31, 2003.
(60) Provisional application No. 60/477,111, filed on Jun. 9, 2003.
(60) Provisional application No. 60/449,945, filed on Feb. 25, 2003.
(60) Provisional application No. 60/423,545, filed on Nov. 1, 2002.

(51) Int. Cl. C12Q 1/68; C07H 21/04

(52) U.S. Cl. 435/6; 536/23.5

(57) ABSTRACT

Association of Type II diabetes and a locus on chromosome 5 is disclosed. In particular, the gene KChIP1 within this locus is shown by linkage analysis to be a susceptibility gene for Type II diabetes. Pathway targeting for drug delivery and diagnosis applications in identifying those who have Type II diabetes or are at risk of developing Type II diabetes, in particular those that are non-obese are described.

### RELATED APPLICATIONS

[0001] This application is a continuation-in-part of International Application No. PCT/US03/34681, which designated the United States and was filed on Oct. 31, 2003, published in English, which claims priority to U.S. Provisional Application No. 60/477,111 filed Jun. 9, 2003, and to U.S. Provisional Application No. 60/449,945, filed on Feb. 25, 2003, and also to U.S. Provisional Application No. 60/423,545, filed on Nov. 1, 2002, the entire contents of all applications are incorporated herein by reference.

### BACKGROUND OF THE INVENTION

[0002] Diabetes mellitus, a metabolic disease in which carbohydrate utilization is reduced and lipid and protein utilization is enhanced, is caused by an absolute or relative deficiency of insulin. In the more severe cases, diabetes is characterized by chronic hyperglycemia, glycosuria, water and electrolyte loss, ketoacidosis and coma. Long term complications include development of neuropathy, retinopathy, nephropathy, generalized degenerative changes in large and small blood vessels and increased susceptibility to infection. The most common form of diabetes is Type II, non-insulin-dependent diabetes that is characterized by hyperglycemia due to impaired insulin secretion and insulin resistance in target tissues. Both genetic and environmental factors contribute to the disease. For example, obesity plays a major role in the development of the disease. Type II diabetes is often a mild form of diabetes mellitus of gradual onset.

[0003] The health implications of Type II diabetes are enormous. In 1995, there were 135 million adults with diabetes worldwide. It is estimated that close to 300 million will have diabetes in the year 2025. (King H., et al., Diabetes Care, 21(9): 1414-1431 (1998)). The prevalence of Type II diabetes in the adult population in Iceland is 2.5% (Vilbergsson, S., et al., Diabet. Med., 14(6): 491-498 (1997)), which comprises approximately 5,000 people over the age of 34 who have the disease. The high prevalence of the disease and increasing population affected shows an unmet medical need to define the genetic factors involved in Type II diabetes to more precisely define the associated risk factors. Also needed are therapeutic agents for prevention of Type II diabetes.

### SUMMARY OF THE INVENTION

[0004] As described herein, a locus on chromosome 5q35 has been demonstrated which plays a major role in Type II diabetes. The locus, referred to as the Type II diabetes locus, comprises a nucleic acid that encodes, KChIP1.

[0005] The present invention relates to genes located within the Type II diabetes—related locus, particularly nucleic acids comprising the KChIP I gene, and the amino acids encoded by these nucleic acids. The invention further relates to pathway targeting for drug delivery and diagnosis in identifying those who have Type II diabetes and those at risk of developing Type II diabetes. Also described are haplotypes and SNPs that can be used to identify individuals with Type II diabetes or at risk of developing Type II diabetes, particularly in those that are non-obese. As a consequence, intervention can be prescribed to these individuals before symptoms of the disease present, e.g., dietary changes, exercise and/or medication. Identification of genes in the Type II diabetes locus can pave the way for a better understanding of the disease process, which in turn can lead to improved diagnostics and therapeutics.

[0006] The present invention pertains to methods of diagnosing a susceptibility to Type II diabetes in an individual, comprising detecting a polymorphism in a KChIP1 nucleic acid, wherein the presence of the polymorphism in the nucleic acid is indicative of a susceptibility to Type II diabetes. The invention additionally pertains to methods of diagnosing Type II diabetes in an individual, comprising detecting a polymorphism in a KChIP1 nucleic acid, wherein the presence of the polymorphism in the nucleic acid is indicative of Type II diabetes. In one embodiment, in diagnosing Type II diabetes or susceptibility to Type II diabetes by detecting the presence of a polymorphism in a KChIP1 nucleic acid, the presence of the polymorphism in the KChIP1 nucleic acid can be indicated, for example, by the presence of one or more of the polymorphisms indicated in Table 10.

[0007] In other embodiments, the invention relates to methods of diagnosing a susceptibility to Type II diabetes in an individual, comprising detecting an alteration in the expression or composition of a polypeptide encoded by a KChIP1 nucleic acid in a test sample, in comparison with the expression or composition of a polypeptide encoded by a KChIP1 nucleic acid in a control sample, wherein the presence of an alteration in expression or composition of the polypeptide in the test sample is indicative of a susceptibility to Type II diabetes. The invention additionally relates to a method of diagnosing Type II diabetes in an individual, comprising detecting an alteration in the expression or composition of a polypeptide encoded by a KChIP1 nucleic acid in a test sample, in comparison with the expression or composition of a polypeptide encoded by KChIP1 nucleic acid in a control sample, wherein the presence of an alteration in expression or composition of the polypeptide in the test sample is indicative of Type II diabetes.

[0008] The invention also relates to an isolated nucleic acid molecule comprising a KChIP1 nucleic acid (e.g., SEQ ID NO: 1 or the complement of SEQ ID NO:1). In certain embodiments, the KChIP1 nucleic acid comprises one or more nucleotide sequence(s) selected from the group of nucleic acid sequences as shown in Table 10 (e.g., SEQ ID NOs: 114-258) and the complements of the group of nucleic acid sequences as shown in Table 10. For example, in certain embodiments, the nucleotide sequence contains one or more polymorphism(s), such as those shown in Table 10. In another embodiment, the invention relates to an isolated nucleic acid molecule which hybridizes under high stringency conditions to a nucleotide sequence selected from the group of SEQ ID NO: 1 and the complement of SEQ ID NO: 1. In certain embodiments, the isolated nucleic acid molecule hybridizes under high stringency conditions to a nucleotide sequence comprising one or more nucleotide sequence(s) selected from the group of nucleic acid sequences as shown in Table 10 (e.g., SEQ ID NOs: 114-258) and the complements of the group of nucleic acid sequences as shown in Table 10. For example, in certain embodiments, the nucleotide sequence contains one or more polymorphism(s), such as those shown in Table 10.

[0009] Also contemplated by the invention is a method of assaying for the presence of a first nucleic acid molecule in a sample, comprising contacting said sample with a second nucleic acid molecule, where the second nucleic acid molecule comprises at least one (or more) nucleic acid sequence(s) selected from the group of SEQ ID NOs: 1 and 114-258, inclusive, wherein the nucleic acid sequence hybridizes to the first nucleic acid under high stringency conditions. In certain embodiments, the second nucleic acid molecule contains one or more polymorphism(s), such as those shown in Table 10.

[0010] The invention also relates to a vector comprising an isolated nucleic acid molecule of the invention (e.g., SEQ ID NOs: 1 and 114-258; optionally including one or more of the polymorphisms shown in Table 10) operably linked to a regulatory sequence, as well as to a recombinant host cell comprising the vector. The invention also provides a method for producing a polypeptide encoded by an isolated nucleic acid molecule having a polymorphism, comprising culturing the recombinant host cell under conditions suitable for expression of the nucleic acid molecule.

[0011] Also contemplated by the invention is a method of assaying for the presence of a polypeptide encoded by an isolated nucleic acid molecule of the invention in a sample, the method comprising contacting the sample with an antibody that specifically binds to the encoded polypeptide.

[0012] The invention further pertains to a method of identifying an agent that alters expression of a KChIP1 nucleic acid, comprising: contacting a solution containing a nucleic acid comprising the promoter region of the KChIP1 gene operably linked to a reporter gene, with an agent to be tested; assessing the level of expression of the reporter gene in the presence of the agent; and comparing the level of expression of the reporter gene in the presence of the agent with a level of expression of the reporter gene in the absence of the agent; wherein if the level of expression of the reporter gene in the presence of the agent differs, by an amount that is statistically significant, from the level of expression in the absence of the agent, then the agent is an agent that alters expression of the KChIP1 gene or nucleic acid. An agent identified by this method is also contemplated.

[0013] The invention additionally comprises a method of identifying an agent that alters expression of a KChIP1 nucleic acid, comprising contacting a solution containing a nucleic acid of the invention or a derivative or fragment thereof, with an agent to be tested; comparing expression of the nucleic acid, derivative or fragment in the presence of the agent with expression of the nucleic acid, derivative or fragment in the absence of the agent; wherein if expression of the nucleic acid, derivative or fragment in the presence of the agent differs, by an amount that is statistically significant, from the expression in the absence of the agent, then the agent is an agent that alters expression of the KChIP 1 nucleic acid. In certain embodiments, the expression of the nucleic acid, derivative or fragment in the presence of the agent comprises expression of one or more splicing variants(s) that differ in kind or in quantity from the expression of one or more splicing variant(s) the absence of the agent. Agents identified by this method are also contemplated.

[0014] Representative agents that alter expression of a KChIP1 nucleic acid contemplated by the invention include, for example, antisense nucleic acids to a KChIP1 gene or nucleic acid; a KChIP1 gene or nucleic acid; a KChIP1 polypeptide; a KChIP1 gene or nucleic acid receptor, or other receptor; a KChIP1 binding agent; a peptidomimetic; a fusion protein; a prodrug thereof; an antibody; and a ribozyme. A method of altering expression of a KChIP1 nucleic acid, comprising contacting a cell containing a nucleic acid with such an agent is also contemplated.

[0015] The invention further pertains to a method of identifying a polypeptide which interacts with a KChIP1 polypeptide (e.g., a KChIP1 polypeptide encoded by a nucleic acid of the invention, such as a nucleic acid comprising one or more polymorphism(s) indicated in Table 10), comprising employing a yeast two-hybrid system using a first vector which comprises a nucleic acid encoding a DNA binding domain and a KChIP1 polypeptide, splicing variant, or a fragment or derivative thereof, and a second vector which comprises a nucleic acid encoding a transcription activation domain and a nucleic acid encoding a test polypeptide. If transcriptional activation occurs in the yeast two-hybrid system, the test polypeptide is a polypeptide, which interacts with a KChIP1 polypeptide.

[0016] In certain methods of the invention, a Type II diabetes therapeutic agent is used. The Type II diabetes therapeutic agent can be an agent that alters (e.g., enhances or inhibits) KChIP1 polypeptide activity and/or KChIP1 nucleic acid expression, as described herein (e.g., a nucleic acid agonist or antagonist).

[0017] Type II diabetes therapeutic agents can alter polypeptide activity or nucleic acid expression of a KChIP1 nucleic acid by a variety of means, such as, for example, by providing additional polypeptide or upregulating the transcription or translation of the nucleic acid encoding the KChIP1 polypeptide; by altering posttranslational processing of the KChIP1 polypeptide; by altering transcription of splicing variants; or by interfering with polypeptide activity (e.g., by binding to the KChIP1 polypeptide, or by binding to another polypeptide that interacts with KChIP 1, such as a KChIP1 binding agent as described herein), by altering (e.g., downregulating) the expression, transcription or translation of a nucleic acid encoding KChIP1; or by altering interaction among KChIP1 and a KChIP1 binding agent.

[0018] In a further embodiment, the invention relates to Type II diabetes therapeutic agent, such as an agent selected from the group consisting of: a KChIP1 nucleic acid or fragment or derivative thereof; a polypeptide encoded by a KChIP1 nucleic acid (e.g., encoded by a KChIP1 nucleic acid having one or more polymorphism(s) such as those set forth in Table 10); a KChIP1 receptor; a KChIP1 binding agent; a peptidomimetic; a fusion protein; a prodrug; an antibody; an agent that alters KChIP1 gene or nucleic acid expression; an agent that alters activity of a polypeptide encoded by a KChIP1 gene or nucleic acid; an agent that alters posttranscriptional processing of a polypeptide encoded by a KChIP1 gene or nucleic acid; an agent that alters interaction of a KChIP1 polypeptide with a KChIP1 binding agent or receptor; an agent that alters transcription of splicing variants encoded by a KChIP1 gene or nucleic acid; and ribozymes. The invention also relates to pharmaceutical compositions comprising at least one Type II diabetes therapeutic agent as described herein.

[0019] The invention also pertains to a method of treating a disease or condition associated with a KChIP1 polypeptide (e.g., Type II diabetes) in an individual, comprising administering a Type II diabetes therapeutic agent to the individual, in a therapeutically effective amount. In certain embodiments, the Type II diabetes therapeutic agent is a KChIP1 agonist; in other embodiments, the Type II diabetes therapeutic agent is a KChIP1 antagonist. The invention additionally pertains to use of a Type II diabetes therapeutic agent as described herein, for the manufacture of a medicament for use in the treatment of Type II diabetes, such as by the methods described herein.

[0020] A transgenic animal comprising a nucleic acid selected from the group consisting of: an exogenous KChIP1 gene or nucleic acid and a nucleic acid encoding a KChIP1 polypeptide, is further contemplated by the invention.

[0021] In yet another embodiment, the invention relates to a method for assaying a sample for the presence of a KChIP1 nucleic acid, comprising contacting the sample with a nucleic acid comprising a contiguous nucleotide sequence which is at least partially complementary to a part of the sequence of said KChIP1 nucleic acid under conditions appropriate for hybridization, and assessing whether hybridization has occurred between a KChIP1 nucleic acid and said nucleic acid comprising a contiguous nucleotide sequence which is at least partially complementary to a part of the sequence of said KChIP1 nucleic acid; wherein if hybridization has occurred, a KChIP1 nucleic acid is present in sample. In certain embodiments, the contiguous nucleotide sequence is completely complementary to a part of the sequence of said KChIP1 nucleic acid. If desired, amplification of at least part of said KChIP1 nucleic acid can be performed.

[0022] In certain other embodiments, the contiguous nucleotide sequence is 100 or fewer nucleotides in length and is either at least 80% identical to a contiguous sequence of nucleotides of one or more of SEQ ID NOs: 1 and 114-258; at least 80% identical to the complement of a contiguous sequence of nucleotides of one or more of SEQ ID NOs: 1 and 114-258; or capable of selectively hybridizing to said KChIP1 nucleic acid.

[0023] In other embodiments, the invention relates to a reagent for assaying a sample for the presence of a KChIP1 gene or nucleic acid, the reagent comprising a contiguous nucleotide sequence which is at least partially complementary to a part of the nucleic acid sequence of said KChIP1 gene or nucleic acid; or comprising a contiguous nucleotide sequence which is completely complementary to a part of the nucleic acid sequence of said KChIP1 gene or nucleic acid. Also contemplated by the invention is a reagent kit, e.g., for assaying a sample for the presence of a KChIP1 nucleic acid, comprising (e.g., in separate containers) one or more labeled nucleic acids comprising a contiguous nucleotide sequence which is at least partially complementary to a part of the nucleic acid sequence of the KChIP1 nucleic acid, and reagents for detection of said label. In certain embodiments, the labeled nucleic acid comprises a contiguous nucleotide sequence that is completely complementary to a part of the nucleotide sequence of said KChIP1 gene or nucleic acid. In other embodiments, the labeled nucleic acid can comprise a contiguous nucleotide sequence which is at least partially complementary to a part of the nucleotide sequence of said KChIP1 gene or nucleic acid, and which is capable of acting as a primer for said KChIP1 nucleic acid when maintained under conditions for primer extension.

[0024] The invention also provides for the use of a nucleic acid which is 100 or fewer nucleotides in length and which is either: a) at least 80% identical to a contiguous sequence of nucleotides of one or more of SEQ ID NOs: 1 and 114-258; b) at least 80% identical to the complement of a contiguous sequence of nucleotides of one or more of SEQ ID NOs: 1 and 114-258; or c) capable of selectively hybridizing to said KChIP1 nucleic acid, for assaying a sample for the presence of a KChIP1 nucleic acid.

[0025] In yet another embodiment, the use of a first nucleic acid which is 100 or fewer nucleotides in length and which is either: a) at least 80% identical to a contiguous sequence of nucleotides of one or more of SEQ ID NOs: 1 and 114-258; b) at least 80% identical to the complement of a contiguous sequence of nucleotides of one or more of SEQ ID NOs: 1 and 114-258; or c) capable of selectively hybridizing to said KChIP1 nucleic acid; for assaying a sample for the presence of a KChIP1 gene or nucleic acid that has at least one nucleotide difference from the first nucleic acid (e.g., a SNP as set forth in Table 10), such as for diagnosing a susceptibility to a disease or condition associated with a KChIP1.

[0026] The invention also relates to a method of diagnosing Type II diabetes or a susceptibility to Type II diabetes in an individual, comprising determining the presence or absence in the individual of certain “haplotypes” (combinations of genetic markers). In one aspect of the invention of diagnosising a susceptibility of the disease, methods are described comprising screening for one of the at-risk haplotypes in the KChIP1 gene that is more frequently present in an individual susceptible to Type II diabetes, compared to the frequency of its presence in the general population, wherein the presence of an at-risk haplotype is indicative of a susceptibility to Type II diabetes. An “at-risk haplotype” is intended to embrace one or a combination of haplotypes described herein over the KChIP1 gene that show high correlation to Type II diabetes. In one embodiment, the at-risk haplotype is characterized by the presence of at least one single nucleotide polymorphisms as described in Table 13. In one embodiment, a haplotype associated with Type II diabetes or a susceptibility to Type II diabetes comprises one or more haplotypes identified in Table 2 (haplotypes identified as A1, A2, A3, A4, A5, A6, B1, B2, B3, B4 and B5), Table 4 (haplotypes identified as D1 and D2), Table 5 (haplotypes identified as D2, D3, D4, D5 and D6) or Table 14 (haplotypes identified as Hap E and Hap E'). In certain embodiments, a haplotype associated with Type II diabetes or a susceptibility to Type II diabetes comprises markers DG5S879, DG5S881, D5S2075, DG5S883 and DG5S38 at the 5q35 locus; or DG5S1058 and DG5S37 at the 5q35 locus; or DG5S1058, DG5S37 and DG5S101 at the 5q35 locus; or DG5S881, DG5S1058, D5S2075, DG5S883 and DG5S38 at the 5q35 locus; or DG5S879, DG5S1058 and DG5S37; or DG5S881, D5S2075, DG5S883 and DG5S38 at the 5q35 locus; DG5S953, DG5S955, DG5S13 and DG5S959 at the 5q35 locus; or DG5S888 and DG5S953 at the 5q35 locus; or DG5S953, DG5S955 and DG5S124 at the 5q35 locus; or DG5S888, DG5S44 and DG5S953 at the 5q35 locus; or DG5S953, DG5S955, DG5S13, DG5S123, and DG5S959 at the 5q35 locus. The presence of the haplotype is diagnostic of Type II diabetes or of a susceptibility to Type II diabetes. Also described herein is a haplotype associated with Type II diabetes or a susceptibility to Type II diabetes comprising markers DG5S13, KCP_{—}1152, and D5S625 at the 5q35 locus; the presence of the haplotype is diagnostic of Type II diabetes or of a susceptibility to Type II diabetes. In one particular embodiment, the presence of the—4, 1, 0 haplotype at DG5S13, KCP_{—}1152, and D5S625 is diagnostic of Type II diabetes or of a susceptibility to Type II diabetes. In another embodiment, a haplotype associated with Type II diabetes or a susceptibility to Type II diabetes in an individual, comprises markers DG5S124, KCP_{—}1152, KCP_{—}2649, KPC_{—}4976 and KPC-16152 at the 5q35 locus. In one particular embodiment, the presence of the 0, 1, 1, 3 and 0 haplotype at DG5S124, KCP_{—}1152, KCP_{—}2649, KPC_{—}4976 and KPC-16152 is diagnostic of Type II diabetes or of a susceptibility to Type II diabetes. In another embodiment, a haplotype associated with Type II diabetes or a susceptibility to Type II diabetes in an individual, comprises markers KCP_{—}173982, KCP_{—}15400, and KCP_{—}18069. In one particular embodiment, the presence of the 0, 1, 1 haplotype at KCP_{—}173982, KCP_{—}15400, and KCP_{—}18069 is diagnostic of Type II diabetes or of a susceptibility to Type II diabetes.

[0027] In additional embodiments, a haplotype associated with Type II diabetes or a susceptibility to Type II diabetes comprises markers DG5S124, KCP_{—}1152, KCP_{—}2649, KCP_{—}4976, and KCP_{—}16152 at the 5q35 locus, as well as one of the following 3 markers: KCP_{—}197678, KCP_{—}197775, and KCP_{—}202795 at the 5q35 locus; the presence of the haplotype is diagnostic of Type II diabetes or of a susceptibility to Type II diabetes. In particular embodiments, the presence of the 0, 3, 1, 1, 3, 0 haplotype at DG5S124, KCP_{—}197678, KCP_{—}1152, KCP_{—}2649, KCP_{—}4976, and KCP_{—}16152; the presence of the 0, 3, 1, 1, 3, 0 haplotype at DG5S124, KCP_{—}197775, KCP_{—}1152, KCP_{—}2649, KCP_{—}4976, and KCP_{—}16152; or the presence of the 0, 1, 1, 1, 3, 0 haplotype at DG5S124, KCP_{—}202795, KCP_{—}1152, KCP_{—}2649, KCP_{—}4976, and KCP_{—}16152; is diagnostic of Type II diabetes or of a susceptibility to Type II diabetes.

[0028] In additional embodiments, a haplotype associated with Type II diabetes or a susceptibility to Type II diabetes comprises markers rs1032856, KCP_RS888934, KCP_{—}93545, KCP_{—}102882, 169234, KCP_{—}186048 and KCP_{—}16152, as well as markers rs1032856, KCP_RS888934, KCP_{—}93545, KCP_{—}102882, 169234, KCP_{—}186048, KCP_{—}197775 and KCP_{—}16152 at the 5q35 locus; the presence of the haplotype is diagnostic of Type II diabetes or of a susceptibility to Type II diabetes. In particular embodiments, the presence of the G, G, T, C, G, G, A haplotype at rs1032856, KCP_RS888934, KCP_{—}93545, KCP_{—}102882, 169234, KCP_{—}186048 and KCP_{—}16152, or the presence of the G, G, T, C, G, G, C, A haplotype at rs1032856, KCP_RS888934, KCP_{—}93545, KCP_{—}102882, 169234, KCP_{—}186048, KCP_{—}197775 and KCP_{—}16152 is diagnostic of Type II diabetes or of a susceptibility to Type II diabetes.

[0029] The presence or absence of the haplotype can be determined by various methods, including, for example, using enzymatic amplification of nucleic acid from the individual, electrophoretic analysis, restriction fragment length polymorphism analysis and/or sequence analysis.

[0030] Also described herein is a method of diagnosing Type II diabetes in an individual, comprising determining the presence or absence in the individual of a haplotype comprising one or more markers and/or single nucleotide polymorphisms as shown in Table 10, Table 2, Table 4, Table 5, Table 13 and/or Table 14 in the locus on chromosome 5q35, wherein the presence of the haplotype is diagnostic of Type II diabetes. Also contemplated is a method of diagnosing a susceptibility to Type II diabetes in an individual, comprising determining the presence or absence in the individual of a haplotype comprising one or more markers and/or single nucleotide polymorphisms as shown in Table 10, Table 13 and/or Table 14 in the locus on chromosome 5q35, wherein the presence of the haplotype is diagnostic of a susceptibility to Type II diabetes.

[0031] A method for the diagnosis and identification of a susceptibility to Type II diabetes in an individual is also described, comprising: screening for an at-risk haplotype in the KChIP1 nucleic acid that is more frequently present in an individual susceptible to Type II diabetes compared to an individual who is not susceptible to Type II diabetes, wherein the at-risk haplotype increases the risk significantly. In certain embodiments, the significant increase is at least about 20% or the significant increase is identified as an odds ratio of at least about 1.2.

[0032] In another embodiment, the invention features a method of diagnosing a predisposition or susceptibility to Type II diabetes in a subject, comprising detecting the presence or absence of a genetic marker associated with the KChIP1 gene, the marker having a p-value of 1×10⁻⁵ or less, wherein the presence of the marker associated with the KChIP1 gene is indicative of a predisposition or susceptibility to Type II diabetes.

[0033] In another embodiment, the invention features a method of diagnosing a predisposition or susceptibility to an Type II diabetes associated condition in a subject, comprising detecting the presence or absence of a genetic marker associated with the KChIP1 gene, the marker having a p-value of 1 ×10⁻⁵ or less, wherein the presence of the marker associated with the KChIP1 gene is indicative of a predisposition or susceptibility to an Type II diabetes associated condition.

[0034] In other embodiments, the at-risk haplotype has a relative risk of at least 1.5, at least 2.5 or at least 3.0. In other embodiments, the at-risk haplotype associated with the TXNIPH gene has a p-value of 1×10⁻⁵ or less, 1×10⁻⁶ or less, 1 ×10⁻⁷ or less or 1 ×10⁻⁸ or less.

[0035] A major application of the current invention involves prediction of those at higher risk of developing a Type II diabetes. Diagnostic tests that define genetic factors contributing to Type II diabetes might be used together with or independent of the known clinical risk factors to define an individual's risk relative to the general population. Better means for identifying those individuals at risk for Type II diabetes should lead to better prophylactic and treatment regimens, including more aggressive management of the current clinical risk factors.

[0036] Another application of the current invention is the specific identification of a rate-limiting pathway involved in Type II diabetes. A disease gene with genetic variation that is significantly more common in diabetic patients as compared to controls represents a specifically validated causative step in the pathogenesis of Type II diabetes. That is, the uncertainty about whether a gene is causative or simply reactive to the disease process is eliminated. The protein encoded by the disease gene defines a rate-limiting molecular pathway involved in the biological process of Type II diabetes predisposition. The proteins encoded by such Type II genes or its interacting proteins in its molecular pathway may represent drug targets that may be selectively modulated by small molecule, protein, antibody, or nucleic acid therapies. Such specific information is greatly needed since the population affected with Type II diabetes is growing.

[0037] A third application of the current invention is its use to predict an individual's response to a particular drug, even drugs that do not act on KChIP1 or its pathway. It is a well-known phenomenon that in general, patients do not respond equally to the same drug. Much of the differences in drug response to a given drug is thought to be based on genetic and protein differences among individuals in certain genes and their corresponding pathways. Our invention defines the association of KChIP1 with Type II diabetes. Some current or future therapeutic agents may be able to affect this gene directly or indirectly and therefore, be effective in those patients whose Type II diabetes risk is in part determined by the KChIP1 genetic variation. On the other hand, those same drugs may be less effective or ineffective in those patients who do not have at risk variation in the KChIP1 gene. Therefore, KChIP1 variation or haplotypes may be used as a pharmacogenomic diagnostic to predict drug response and guide choice of therapeutic agent in a given individual.

### BRIEF DESCRIPTION OF THE DRAWINGS

[0038] The foregoing and other objects, features and advantages of the invention will be apparent from the following more particular description of preferred embodiments of the invention, as illustrated in the accompanying drawings.

[0039] FIG. 1.1 through 1.148 show the KChIP1 genomic DNA (SEQ ID NO: 1). This sequence is taken from NCBI Build 33. The numbering in FIG. 1, as well as the “start” and “end” numbers in all Tables refer to the location in Chromosome 5 in NCBI Build 33. The numbering in FIG. 1 refers to the last base in the line immediately preceding the number; the numbers are in decreasing order because of the “reverse orientation” of the gene.

[0040] FIG. 2 shows the amino acid sequence of KChIP1 as published by An et al. Nature, 403(6768): 553-6 (2000) (SEQ ID NO: 2).

[0041] FIG. 3 shows the nucleic acid sequence (SEQ ID NO: 3) encoding the amino acid sequence of KChIP1 as published by An et al, Nature, 403(6768): 553-6 (2000) (SEQ ID NO: 2).

[0042] FIG. 4 is a series of graphs showing the results of a genome-wide scan using 906 microsatellite markers. Results are shown for three phenotypes: all Type II diabetics (solid lines), obese Type II diabetics (dotted lines) and non-obese Type II diabetics (dashed lines). The multipoint allele-sharing LOD-score is on the vertical axis, and the centimorgan distance from the P-terminus of the chromosome is on the horizontal axis.

[0043] FIG. 5 graphically depicts the multipoint allele-sharing LOD-score of the locus on chromosome 5 after 38 microsatellite markers have been added to the framework set in a 40-cM interval, from 160 cM to 200 cM. Results are shown for the same three phenotypes as in FIG. 4; all Type II diabetics (solid line), non-obese Type II diabetics (dashed line) and obese Type II diabetics (dotted line) the results of a genome-wide scan using 906 microsatellite markers.

[0044] FIG. 6 graphically depicts the single-marker and haplotype association within the 1-LOD-drop for 590 non-obese diabetics vs 477 unrelated population controls. The location of the markers and haplotypes is on the horizontal axis and the corresponding two-sided P-value on the vertical axis. All haplotypes with a P-value less than 0.01 are shown. The horizontal bars indicate the span of the corresponding haplotypes and the marker density is shown at the bottom of the figure. All locations refer to NCBI Build 33 and the 1-LOD-drop spans from 167.64 to 171.28 Mb.

[0045] FIG. 7 schematically shows the location of genes and markers in region B. The microsatellites used in the locus-wide association study are shown as filled circles at the top. The filled boxes indicate the locations of exons, or clusters of exons, for KChIP1. The shaded boxes indicated the location and size of the neighboring genes, LCP2, KCNMB1, GABRP and RANBP17, and the grey horizontal lines indicate the span of the five most significant microsatellite haplotypes in the region.

### DETAILED DESCRIPTION OF THE INVENTION

[0046] Extensive genealogical information for a population with population-based lists of patients with Type II diabetes has been combined with powerful gene sharing methods to map a locus on chromosome 5q35. Diabetics and their relatives were genotyped with a genome-wide marker set including 906 microsatellite markers, with an average marker density of 4 cM. Due to the role obesity plays in the development of diabetes, the material was fractionated according to body mass index (BMI). Presented herein are results of a genome wide search of genes that cause Type II diabetes in Iceland.

Loci Associated with Diabetes

[0047] Evidence for genes causing the early onset monogenic form of diabetes have been previously identified. Mutations in six genes have been discovered that cause MODY, or maturity onset diabetes of the young. MODY1-MODY6 are due to mutations in HNF4a, glucokinase, HNF1a, IPF1, HNF1b and NEUROD1 (MODY1:

[0048] Yamagata K, et al., Nature 384:458-460 (1996); MODY2: Froguel P, F et al., Nature 356: 162-164(1992); MODY3: Yamagata, K., et al., Nature 384: 455-458 (1996); MODY4: Yoshioka M., et al., Diabetes May;46(5):887-94 (1997) MODY5: Horikawa, Y., et al., Nat. Genet. 17: 384-385 (1997) MODY6: Kristinsson S. Y., et al., Diabetologia November:44(11):2098-103 (2001)).

[0049] One gene has been identified as a disease gene that contributes to the late-onset form of diabetes, the calpain 10 gene (CAPN10). CAPN10, was identified though a genome-wide screen of Mexican American sibpairs with diabetes (Horikawa, Y., et al., Nat. Genet. 26(2) 163-175(2000)). The risk allele has been shown to be associated with impaired regulation of glucose-induced secretion and decreased rate of insulin-stimulated glucose disposal (Lynn, S., et al., Diabetes, 51(1): 247-250 (2002); Sreenan, S. K., et al., Diabetes 50(9) 2013-2020 (2001) and Baier, L. J., et al., J. Clin. Invest. 106(7) R69-73 (2000)).

[0050] Many genome-wide screens in a variety of populations have been performed that have resulted in major loci for Diabetes. Loci are reported on chromosome 2q37 (Hanis, C. L., et al., Nat. Genet., 13(2):161-166 (1996)), chromosome 15q21 (Cox, et al., Nat. Genet. 21(2):213-215 (1999)), chromosome 10q26 (Duggirala, R., et al., Am. J. Hum. Genet., 68(5): 1149-1164 (2001)), chromosome 3p (Ehm, M. G., et al., Am. J. Hum. Genet., 66(6):1871-1881 (2000)) in Mexican Americans, and chromosomes 1q21-23 and 11q23-q25 (Hanson R. L. et al., Am J. Hum Genet., 63(4):1130-1138 (1998)) in PIMA Indians. In the Caucasian population, linkages have been observed to chromosome 12q24 in Finns (Mahtani, et al., Nat. Genet., 14(1):90-4 (1994)), chromosome 1q21-q23 in Americans in Utah (Elbein, S. C., et al., Diabetes, 48(5):1175-1182 (1999)), chromosome 3q27-pter in French families (Vionnet, N., et al., Am. J. Hum. Genet. 67(6):1470-80 (2000) and chromosome 18p11 in Scandinavians (Parker, A., et al., Diabetes, 50(3) 675-680 (2001)). A recent study reported a major locus in indigenous Australians on chromosome 2q24.3 (Busfield, F,. et al., Am. J. Hum. Genet., 70(2): 349-357 (2002)). Many other studies have resulted in suggestive loci or have replicated these loci.

[0051] Association studies have been reported for Type II diabetes. Most of these studies show modest association to the disease in a group of people but do not account for the disease. Altshuler et al., reviewed the association work that has been done and concluded that association to only one of 16 genes revealed held up to scrutiny. Altshuler et al., confirmed that the Pro12Ala polymorphism in PPARg is associated with Type II diabetes. Until now, there have been no linkage studies in Type II diabetes linking the disease to chromosome 5q35

KChIP1

[0052] The invention described herein has linked Type II diabetes to a gene encoding Kv channel-interacting protein 1 (KChIP1; also known as KCNIP1). In the brain and heart, rapidly inactivating (A-type) voltage-gated potassium (Kv) currents operate at subthreshold membrane potentials to control the excitability of neurons and cardiac myocytes. Although pore-forming alpha-subunits of the Kv4, or Shal-related, channel family form A-Type currents in heterologous cells, these differ significantly from native A-Type currents. To identify proteins that interacted with the Kv4 subunit, An et al., (“Modulation of A-Type potassium channels by a family of calcium sensors” Nature 403:553-6 (2000)) used the yeast two-hybrid system with the intracellular amino terminus of the rat Kv4.3 subunit to screen rat midbrain cDNA libraries. Two Kv channel-interacting proteins were identified and called KChIPs (KChIP-1 and KChIP2). Library screening and database mining identified mouse and human orthologs of these genes. The KChIP1 cDNA encodes a 216-amino acid protein. The KChIPs have 4 EF-hand-like domains and bind calcium ions. Both KChIPs have distinct N termini but share approximately 70% amino acid identity throughout a carboxy-terminal 185-amino acid core domain that contains the 4 EF-hand-like motifs. Although the KChIPs have around 40% amino acid similarity to neuronal calcium sensor-1 and are members of the recoverin/NCS subfamily of calcium-binding proteins, other members of this subfamily, such as hippocalcin, did not interact with Kv4 channels in the yeast 2-hybrid assay. An et al., (supra) additionally found that expression of KChIPs and Kv4 together reconstitutes several features of native A-Type currents by modulating the density, inactivation kinetics, and rate of recovery from inactivation of Kv4 channels in heterologous cells. Both KChIPs colocalize and coimmunoprecipitate with brain Kv4 alpha-subunits, and are thus integral components of native Kv4 channel complexes. As the activity and density of neuronal A-Type currents tightly control responses to excitatory synaptic inputs, these KChIPs may regulate A-Type currents, and hence neuronal excitability, in response to changes in intracellular calcium.

[0053] The glycosphingolipid sulfatide is present in secretory granules and at the surface of pancreatic β-cells (Buschard K, Fredman P. “Sulphatide as an antigen in diabetes mellitus”. Diabetes Nutr Metab 4:221 -228 (1996)), and antisulfatide antibodies (ASA; IgG1) are found in serum from the majority of patients with newly diagnosed Type I diabetes. Buschard et al., (“Sulfatide controls insulin secretion by modulation of ATP-sensitive K(+)-channel activity and Ca(2+)-dependent exocytosis in rat pancreatic beta-cells” Diabetes 51:2514-21 (2002)) demonstrated that sulfatide produced a glucose- and concentration-dependent inhibition of insulin release from isolated rat pancreatic islets. This inhibition of insulin secretion was due to activation of ATP-sensitive K⁺-(K_{ATP}) channels in single rat β-cells. No effect of sulfatide was observed on whole-cell Ca²⁺-channel activity or glucose-induced elevation of cytoplasmic Ca²⁺ concentration. A key observation was that sulfatide stimulated Ca²⁺-dependent exocytosis determined by capacitance measurements and depolarized-induced insulin secretion from islets exposed to diazoxide and high external KCl. The monoclonal sulfatide antibody Sulph I as well as ASA-positive serum reduced glucose-induced insulin secretion by inhibition of Ca²⁺-dependent exocytosis. This suggests that sulfatide is important for the control of glucose-induced insulin secretion and that both an increase and a decrease in the sulfatide content have an impact on the secretory capacity of the individual β-cells.

Assessment for At-Risk Haplotypes

[0054] A “haplotype,” as described herein, refers to a combination of genetic markers (“alleles”), such as those set forth in Table 2, Table 4, Table 5 and Table 14. In a certain embodiment, the haplotype can comprise one or more alleles, two or more alleles, three or more alleles, four or more alleles, or five or more alleles. The genetic markers are particular “alleles” at “polymorphic sites” associated with KChPI1. A nucleotide position at which more than one sequence is possible in a population (either a natural population or a synthetic population, e.g., a library of synthetic molecules) is referred to herein as a “polymorphic site”. Where a polymorphic site is a single nucleotide in length, the site is referred to as a single nucleotide polymorphism (“SNP”). For example, if at a particular chromosomal location, one member of a population has an adenine and another member of the population has a thymine at the same position, then this position is a polymorphic site, and, more specifically, the polymorphic site is a SNP. Polymorphic sites can allow for differences in sequences based on substitutions, insertions or deletions. Each version of the sequence with respect to the polymorphic site is referred to herein as an “allele” of the polymorphic site. Thus, in the previous example, the SNP allows for both an adenine allele and a thymine allele.

[0055] Typically, a reference sequence is referred to for a particular sequence. Alleles that differ from the reference are referred to as “variant” alleles. For example, the reference KChPI1 sequence is described herein by SEQ ID NO: 1. The term, “variant KChPI1”, as used herein, refers to a sequence that differs from SEQ ID NO: 1 but is otherwise substantially similar. The genetic markers that make up the haplotypes described herein are KChPI1 variants. Additional variants can include changes that affect a polypeptide, e.g., the KChPI1 polypeptide. These sequence differences, when compared to a reference nucleotide sequence, can include the insertion or deletion of a single nucleotide, or of more than one nucleotide, resulting in a frame shift; the change of at least one nucleotide, resulting in a change in the encoded amino acid; the change of at least one nucleotide, resulting in the generation of a premature stop codon; the deletion of several nucleotides, resulting in a deletion of one or more amino acids encoded by the nucleotides; the insertion of one or several nucleotides, such as by unequal recombination or gene conversion, resulting in an interruption of the coding sequence of a reading frame; duplication of all or a part of a sequence; transposition; or a rearrangement of a nucleotide sequence, as described in detail above. Such sequence changes alter the polypeptide encoded by a KChPI1 nucleic acid. For example, if the change in the nucleic acid sequence causes a frame shift, the frame shift can result in a change in the encoded amino acids, and/or can result in the generation of a premature stop codon, causing generation of a truncated polypeptide. Alternatively, a polymorphism associated with Type II diabetes or a susceptibility to Type II diabetes can be a synonymous change in one or more nucleotides (i.e., a change that does not result in a change in the amino acid sequence). Such a polymorphism can, for example, alter splice sites, affect the stability or transport of MRNA, or otherwise affect the transcription or translation of the polypeptide. The polypeptide encoded by the reference nucleotide sequence is the “reference” polypeptide with a particular reference amino acid sequence, and polypeptides encoded by variant alleles are referred to as “variant” polypeptides with variant amino acid sequences.

[0056] Haplotypes are a combination of genetic markers, e.g., particular alleles at polymorphic sites. The haplotypes described herein, e.g., having markers such as those shown in Table 6, Table 7, Table 9, Table 11, Table 12, Table 13 and Table 14 are found more frequently in individuals with Type II diabetes than in individuals without Type II diabetes. Therefore, these haplotypes have predictive value for detecting Type II diabetes or a susceptibility to Type II diabetes in an individual. The haplotypes described herein are a combination of various genetic markers, e.g., SNPs and microsatellites. Therefore, detecting haplotypes can be accomplished by methods known in the art for detecting sequences at polymorphic sites, such as the methods described above.

[0057] In certain methods described herein, an individual who is at risk for Type II diabetes is an individual in whom an at-risk haplotype is identified. In one embodiment, the at-risk haplotype is one that confers a significant risk of Type II diabetes. In one embodiment, significance associated with a haplotype is measured by an odds ratio. In a further embodiment, the significance is measured by a percentage. In one embodiment, a significant risk is measured as an odds ratio of at least about 1.2, including but not limited to: 1.2, 1.3, 1.4, 1.5, 1.6, 1.7, 1.8 and 1.9. In a further embodiment, an odds ratio of at least 1.2 is significant. In a further embodiment, an odds ratio of at least about 1.5 is significant. In a further embodiment, a significant increase in risk is at least about 1.7 is significant. In a further embodiment, a significant increase in risk is at least about 20%, including but not limited to about 25%, 30%, 35%,40%, 45%, 50%, 55%, 60%, 65%, 70%, 75%, 80%, 85%, 90%, 95% and 98%. In a further embodiment, a significant increase in risk is at least about 50%. It is understood however, that identifying whether a risk is medically significant may also depend on a variety of factors, including the specific disease, the haplotype, and often, environmental factors.

[0058] An at-risk haplotype in, or comprising portions of, the KChPI1 gene, is one where the haplotype is more frequently present in an individual at risk for Type II diabetes (affected), compared to the frequency of its presence in a healthy individual (control), and wherein the presence of the haplotype is indicative of Type II diabetes or susceptibility to Type II diabetes.

[0059] Standard techniques for genotyping for the presence of SNPs and/or microsatellite markers can be used, such as fluorescent-based techniques (Chen, et al., Genome Res. 9, 492 (1999)), PCR, LCR, Nested PCR and other techniques for nucleic acid amplification. In one embodiment, the method comprises assessing in an individual the presence or frequency of SNPs and/or microsatellites in, comprising portions of, the KChIP1 gene, wherein an excess or higher frequency of the SNPs and/or microsatellites compared to a healthy control individual is indicative that the individual has Type II diabetes, or is susceptible to Type II diabetes. See, for example, Table 6, Table 7, Table 9, Table 11, Table 12 and 13 (below) for SNPs and markers that can form haplotypes that can be used as screening tools. These markers and SNPs can be identified in at-risk haploptypes. For example, an at-risk haplotype can include microsatellite markers and/or SNPs such as those set forth in Table 2, Table 4, Table 5 and Table 14. The presence of the haplotype is indicative a susceptibility to Type II diabetes, and therefore is indicative of an individual who falls within a target population for the treatment methods described herein.

[0060] Haplotype analysis involves defining a candidate susceptibility locus using LOD scores. The defined regions are then ultra-fine mapped with microsatellite markers with an average spacing between markers of less than 100 kb. All usable microsatellite markers that found in public databases and mapped within that region can be used. In addition, microsatellite markers identified within the deCODE genetics sequence assembly of the human genome can be used.

[0061] The frequencies of haplotypes in the patient and the control groups using an expectation-maximization algorithm can be estimated (Dempster A. et al., 1977. J. R. Stat. Soc. B, 39:1-389). An implementation of this algorithm that can handle missing genotypes and uncertainty with the phase can be used. Under the null hypothesis, the patients and the controls are assumed to have identical frequencies. Using a likelihood approach, an alternative hypothesis where a candidate at-risk-haplotype, which can include the KChPI1 SNPs, is allowed to have a higher frequency in patients than controls, while the ratios of the frequencies of other haplotypes are assumed to be the same in both groups is tested. Likelihoods are maximized separately under both hypotheses and a corresponding 1-df likelihood ratio statistic is used to evaluate the statistic significance.

[0062] To look for at-risk-haplotypes in the 1-lod drop, for example, association of all possible combinations of genotyped markers is studied, provided those markers span a practical region. The combined patient and control groups can be randomly divided into two sets, equal in size to the original group of patients and controls. The haplotype analysis is then repeated and the most significant p-value registered is determined. This randomization scheme can be repeated, for example, over 100 times to construct an empirical distribution of p-values. In a preferred embodiment, a p-value of <0.05 is indicative of an at-risk haplotype.

[0063] A detailed discussion of haplotype analysis follows.

Haplotype Analysis

[0064] Our general approach to haplotype analysis involves using likelihood-based inference applied to NEsted MOdels. The method is implemented in our program NEMO, which allows for many polymorphic markers, SNPs and microsatellites. The method and software are specifically designed for case-control studies where the purpose is to identify haplotype groups that confer different risks. It is also a tool for studying LD structures.

[0065] When investigating haplotypes constructed from many markers, apart from looking at each haplotype individually, meaningful summaries often require putting haplotypes into groups. A particular partition of the haplotype space is a model that assumes haplotypes within a group have the same risk, while haplotypes in different groups can have different risks. Two models/partitions are nested when one, the alternative model, is a finer partition compared to the other, the null model, i.e, the alternative model allows some haplotypes assumed to have the same risk in the null model to have different risks. The models are nested in the classical sense that the null model is a special case of the alternative model. Hence traditional generalized likelihood ratio tests can be used to test the null model against the alternative model. Note that, with a multiplicative model, if haplotypes hᵢ and hⱼ are assumed to have the same risk, it corresponds to assuming that fᵢ/pᵢ=fⱼ/pⱼ where fand p denote haplotype frequencies in the affected population and the control population respectively.

[0066] One common way to handle uncertainty in phase and missing genotypes is a two-step method of first estimating haplotype counts and then treating the estimated counts as the exact counts, a method that can sometimes be problematic (e.g., see the information measure section below) and may require randomization to properly evaluate statistical significance. In NEMO, maximum likelihood estimates, likelihood ratios and p-values are calculated directly, with the aid of the EM algorithm, for the observed data treating it as a missing-data problem.

[0067] NEMO allows complete flexibility for paritions. For example, the first haplotype problem described in the Methods section on Statistical analysis considers testing whether h₁ has the same risk as the other haplotypes h₂, . . . , hₖ. Here the alternative grouping is [h₁], [h₂, . . . , hₖ] and the null grouping is [h₁, . . . , hₖ]. The second haplotype problem in the same section involves three haplotypes h₁=G0, h₂=GX and h₃=AX, and the focus is on comparing h₁ and h₂. The alternative grouping is [h₁], [h₂], [h₃] and the null grouping is [h₁, h₂], [h₃]. If composite alleles exist, one could collapse these alleles into one at the data processing stage, and performed the test as described. This is a perfectly valid approach, and indeed, whether we collapse or not makes no difference if there were no missing information regarding phase. But, with the actual data, if each of the alleles making up a composite correlates differently with the SNP alleles, this will provide some partial information on phase. Collapsing at the data processing stage will unnecessarily increase the amount of missing information. A nested-models/partition framework can be used in this scenario. Let h₂ be split into h₂ₐ, h_{2b}, . . . , h₂ₑ, and h₃ be split into h₃ₐ, h_{3b}, . . . , h₃ₑ. Then the alternative grouping is [h₁], [h₂ₐ, h_{2b}, . . . , h₂ₑ], [h₃ₐ, h_{3b}, . . . , h₃ₑ] and the null grouping is [h₁, h₂ₐ, h_{2b}, . . . , h₂ₑ], [h₃ₐ, h_{3b}, . . . , h₃ₑ]. The same method can be used to handle composite where collapsing at the data processing stage is not even an option since L_{C} represents multiple haplotypes constructed from multiple SNPs. Alternatively, a 3-way test with the alternative grouping of [h₁], [h₂ₐ, h_{2b}, . . . , h₂ₑ], [h₃ₐ, h_{3b}, . . . , h₃ₑ] versus the null grouping of [h₁, h₂ₐ, h_{2b}, . . . , h₂ₑ, h₃ₐ, h_{3b}, . . . , h₃ₑ] could also be performed. Note that the generalized likelihood ratio test-statistic would have two degrees of freedom instead of one.

Measuring Information

[0068] Even though likelihood ratio tests based on likelihoods computed directly for the observed data, which have captured the information loss due to uncertainty in phase and missing genotypes, can be relied on to give valid p-values, it would still be of interest to know how much information had been lost due to the information being incomplete. Interestingly, one can measure information loss by considering a two-step procedure to evaluating statistical significance that appears natural but happens to be systematically anti-conservative. Suppose we calculate the maximum likelihood estimates for the population haplotype frequencies calculated under the alternative hypothesis that there are differences between the affected population and control population, and use these frequency estimates as estimates of the observed frequencies of haplotype counts in the affected sample and in the control sample. Suppose we then perform a likelihood ratio test treating these estimated haplotype counts as though they are the actual counts. We could also perform a Fisher's exact test, but we would then need to round off these estimated counts since they are in general non-integers. This test will in general be anti-conservative because treating the estimated counts as if they were exact counts ignores the uncertainty with the counts, overestimates the effective sample size and underestimates the sampling variation. It means that the chi-square likelihood-ratio test statistic calculated this way, denoted by Λ*, will in general be bigger than Λ, the likelihood-ratio test-statistic calculated directly from the observed data as described in methods. But Λ* is useful because the ratio Λ/Λ* happens to be a good measure of information, or 1−(Λ/Λ*) is a measure of the fraction of information lost due to missing information. This information measure for haplotype analysis is described in Nicolae and Kong, Technical Report 537, Department of Statistics, University of Statistics, University of Chicago, Revised for Biometrics (2003) as a natural extension of information measures defined for linkage analysis, and is implemented in NEMO.

Statistical Analysis.

[0069] For single marker association to the disease, the Fisher exact test can be used to calculate two-sided p-values for each individual allele. All p-values are presented unadjusted for multiple comparisons unless specifically indicated. The presented frequencies (for microsatellites, SNPs and haplotypes) are allelic frequencies as opposed to carrier frequencies. To minimize any bias due the relatedness of the patients who were recruited as families for the linkage analysis, first and second-degree relatives can be eliminated from the patient list. Furthermore, the test can be repeated for association correcting for any remaining relatedness among the patients, by extending a variance adjustment procedure described in Risch, N. & Teng, J. (Genome Res., 8:1278-1288 (1998)). The relative power of family-based and case-control designs for linkage disequilibrium studies of complex human diseases I. DNA pooling. (ibid) for sibships so that it can be applied to general familial relationships, and present both adjusted and unadjusted p-values for comparison. The differences are in general very small as expected. To assess the significance of single-marker association corrected for multiple testing we carried out a randomisation test using the same genotype data. Cohorts of patients and controls can be randomized and the association analysis redone multiple times (e.g., up to 500,000 times) and the p-value is the fraction of replications that produced a p-value for some marker allele that is lower than or equal to the p-value we observed using the original patient and control cohorts.

[0070] For both single-marker and haplotype analyses, relative risk (RR) and the population attributable risk (PAR) can be calculated assuming a multiplicative model (haplotype relative risk model), (Terwilliger, J. D. & Ott, J., Hum Hered, 42, 337-46 (1992) and Falk, C. T. & Rubinstein, P, Ann Hum Genet 51 (Pt 3), 227-33 (1987)), i.e., that the risks of the two alleles/haplotypes a person carries multiply. For example, if RR is the risk of A relative to a, then the risk of a person homozygote AA will be RR times that of a heterozygote Aa and RR² times that of a homozygote aa. The multiplicative model has a nice property that simplifies analysis and computations—haplotypes are independent, i.e., in Hardy-Weinberg equilibrium, within the affected population as well as within the control population. As a consequence, haplotype counts of the affecteds and controls each have multinomial distributions, but with different haplotype frequencies under the alternative hypothesis. Specifically, for two haplotypes hᵢ and hⱼ, risk(hᵢ)/risk(hⱼ)=(fᵢ/pᵢ)/(fⱼ/pⱼ), where f and p denote respectively frequencies in the affected population and in the control population. While there is some power loss if the true model is not multiplicative, the loss tends to be mild except for extreme cases. Most importantly, p-values are always valid since they are computed with respect to null hypothesis.

[0071] In general, haplotype frequencies are estimated by maximum likelihood and tests of differences between cases and controls are performed using a generalized likelihood ratio test (Rice, J. A. Mathematical Statistics and Data Analysis, 602 (International Thomson Publishing, (1995)). deCODE's haplotype analysis program called NEMO, which stands for NEsted MOdels, can be used to calculate all the haplotype results. To handle uncertainties with phase and missing genotypes, it is emphasized that we do not use a common two-step approach to association tests, where haplotype counts are first estimated, possibly with the use of the EM algorithm, Dempster, (A. P., Laird, N. M. & Rubin, D. B., Journal of the Royal Statistical Society B, 39, 1-38 (1971)) and then tests are performed treating the estimated counts as though they are true counts, a method that can sometimes be problematic and may require randomisation to properly evaluate statistical significance. Instead, with NEMO, maximum likelihood estimates, likelihood ratios and p-values are computed with the aid of the EM-algorithm directly for the observed data, and hence the loss of information due to uncertainty with phase and missing genotypes is automatically captured by the likelihood ratios. Even so, it is of interest to know how much information is retained, or lost, due to incomplete information. Described herein is such a measure that is natural under the likelihood framework. For a fixed set of markers, the simplest tests performed compare one selected haplotype against all the others. Call the selected haplotype h₁ and the others h₂, . . . , hₖ. Let p₁, . . . , pₖ denote the population frequencies of the haplotypes in the controls, and f₁, . . . , fₖ denote the population frequencies of the haplotypes in the affecteds. Under the null hypothesis, fᵢ=pᵢ for all i. The alternative model we use for the test assumes h₂, . . . , hₖ to have the same risk while h₁ is allowed to have a different risk. This implies that while p₁ can be different from f₁, fᵢ/(f₂+ . . . +fₖ)=pᵢ/(p₂+ . . . +pₖ)=βᵢ for i=2, . . . , k. Denoting f₁/p₁ by r, and noting that β₂+ . . . +βₖ=1, the test statistic based on generalized likelihood ratios is
Λ=2[Λ(\hat{r}, \hat{p}₁, \hat{β}₂, . . . , \hat{β}ₖ₋₁)−Λ(1, \tilde{p}₁, \tilde{β}₂, . . . , \tilde{β}ₖ₋₁) ]
where Λ denotes logₑlikelihood and ˜ and Λ denote maximum likelihood estimates under the null hypothesis and alternative hypothesis respectively. Λ has asymptotically a chi-square distribution with 1-df, under the null hypothesis. Slightly more complicated null and alternative hypotheses can also be used. For example, let h₁ be G0, h₂ be GX and h₃ be AX. When comparing G0 against GX, i.e., this is the test which gives estimated RR of 1.46 and p-value=0.0002, the null assumes G0 and GX have the same risk but AX is allowed to have a different risk. The alternative hypothesis allows, for example, three haplotype groups to have different risks. This implies that, under the null hypothesis, there is a constraint that f₁/p₁=f₂/p₂, or w=[f₁/p₁]/[f₂/p₂]=1. The test statistic based on generalized likelihood ratios is
Λ=2[Λ(\hat{p}₁, \hat{f}₁, \hat{p}₂, ŵ)−Λ(\tilde{p}₁\tilde{f}₁, \tilde{p}₂, 1)]
that again has asymptotically a chi-square distribution with 1-df under the null hypothesis. If there are composite haplotypes (for example, h₂ and h₃), that is handled in a natural manner under the nested models framework.

[0072] LD between pairs of SNPs can be calculated using the standard definition of D′ and R² (Lewontin, R., Genetics 49,49-67 (1964) and Hill, W. G. & Robertson, A. Theor. Appl. Genet. 22, 226-231 (1968)).Using NEMO, frequencies of the two marker allele combinations are estimated by maximum likelihood and deviation from linkage equilibrium is evaluated by a likelihood ratio test. The definitions of D′ and R² are extended to include microsatellites by averaging over the values for all possible allele combination of the two markers weighted by the marginal allele probabilities. When plotting all marker combination to elucidate the LD structure in a particular region, we plot D′ in the upper left corner and the p-value in the lower right corner. In the LD plots the markers can be plotted equidistant rather than according to their physical location, if desired.

Statistical Methods for Linkage Analysis

[0073] Multipoint, affected-only allele-sharing methods can be used in the analyses to assess evidence for linkage. Results, both the LOD-score and the non-parametric linkage (NPL) score, can be obtained using the program Allegro (Gudbjartsson et al., Nat. Genet. 25:12-3, 2000). Our baseline linkage analysis uses the Spairs scoring function (Whittemore, A. S., Halpern, J. (1994), Biometrics 50:118-27; Kruglyak L, et al. (1996), Am J Hum Genet 58:1347-63), the exponential allele-sharing model (Kong, A. and Cox, N. J. (1997), Am J Hum Genet 61:1179-88) and a family weighting scheme that is halfway, on the log-scale, between weighting each affected pair equally and weighting each family equally. The information measure we use is part of the Allegro program output and the information value equals zero if the marker genotypes are completely uninformative and equals one if the genotypes determine the exact amount of allele sharing by decent among the affected relatives (Gretarsdottir et al., Am. J. Hom. Genet, 70:593-603, (2002)). We computed the P-values two different ways and here report the less significant result. The first P-value can be computed on the basis of large sample theory; the distribution of Z₁ᵣ=√(2[logₑ(10)LOD]) approximates a standard normal variable under the null hypothesis of no linkage (Kong, A. and Cox, N. J. (1997), Am J Hum Genet 61:1179-88). The second P-value can be calculated by comparing the observed LOD-score with its complete data sampling distribution under the null hypothesis (e.g., Gudbjartsson et al., Nat. Genet. 25:12-3, 2000). When the data consist of more than a few families, these two P-values tend to be very similar.

Nucleic Acid Therapeutic Agents

[0074] In another embodiment, a nucleic acid of the invention; a nucleic acid complementary to a nucleic acid of the invention; or a portion of such a nucleic acid (e.g., an oligonucleotide as described below); or a nucleic acid encoding a KChIP1 polypeptide, can be used in “antisense” therapy, in which a nucleic acid (e.g., an oligonucleotide) which specifically hybridizes to the mRNA and/or genomic DNA of a nucleic acid is administered or generated in situ. The antisense nucleic acid that specifically hybridizes to the mRNA and/or DNA inhibits expression of the polypeptide encoded by that mRNA and/or DNA, e.g., by inhibiting translation and/or transcription. Binding of the antisense nucleic acid can be by conventional base pair complementarity, or, for example, in the case of binding to DNA duplexes, through specific interaction in the major groove of the double helix.

[0075] An antisense construct can be delivered, for example, as an expression plasmid as described above. When the plasmid is transcribed in the cell, it produces RNA that is complementary to a portion of the MRNA and/or DNA that encodes a KChIP1 polypeptide. Alternatively, the antisense construct can be an oligonucleotide probe that is generated ex vivo and introduced into cells; it then inhibits expression by hybridizing with the mRNA and/or genomic DNA of the polypeptide. In one embodiment, the oligonucleotide probes are modified oligonucleotides that are resistant to endogenous nucleases, e.g., exonucleases and/or endonucleases, thereby rendering them stable in vivo. Exemplary nucleic acid molecules for use as antisense oligonucleotides are phosphoramidate, phosphothioate and methylphosphonate analogs of DNA (see also U.S. Pat. Nos. 5,176,996, 5,264,564 and 5,256,775). Additionally, general approaches to constructing oligomers useful in antisense therapy are also described, for example, by Van der Krol et al. (BioTechniques 6:958-976 (1988)); and Stein et al. (Cancer Res. 48:2659-2668 (1988)). With respect to antisense DNA, oligodeoxyribonucleotides derived from the translation initiation site are preferred.

[0076] To perform antisense therapy, oligonucleotides (mRNA, cDNA or DNA) are designed that are complementary to MRNA encoding the polypeptide. The antisense oligonucleotides bind to mRNA transcripts and prevent translation. Absolute complementarity, although preferred, is not required. A sequence “complementary” to a portion of an RNA, as referred to herein, indicates that a sequence has sufficient complementarity to be able to hybridize with the RNA, forming a stable duplex; in the case of double-stranded antisense nucleic acids, a single strand of the duplex DNA may thus be tested, or triplex formation may be assayed. The ability to hybridize will depend on both the degree of complementarity and the length of the antisense nucleic acid, as described in detail above. Generally, the longer the hybridizing nucleic acid, the more base mismatches with an RNA it may contain and still form a stable duplex (or triplex, as the case may be). One skilled in the art can ascertain a tolerable degree of mismatch by use of standard procedures.

[0077] The oligonucleotides used in antisense therapy can be DNA, RNA, or chimeric mixtures or derivatives or modified versions thereof, single-stranded or double-stranded. The oligonucleotides can be modified at the base moiety, sugar moiety, or phosphate backbone, for example, to improve stability of the molecule, hybridization, etc. The oligonucleotides can include other appended groups such as peptides (e.g., for targeting host cell receptors in vivo), or agents facilitating transport across the cell membrane (see, e.g., Letsinger et al., Proc. Natl. Acad. Sci. USA 86:6553-6556 (1989); Lemaitre et al., Proc. Natl. Acad. Sci. USA 84:648-652 (1987); PCT International Publication NO: WO 88/09810) or the blood-brain barrier (see, e.g., PCT International Publication NO: WO 89/10134), or hybridization-triggered cleavage agents (see, e.g., Krol et al., BioTechniques 6:958-976 (1988)) or intercalating agents. (See, e.g., Zon, Pharn.Res. 5: 539-549 (1988)). To this end, the oligonucleotide may be conjugated to another molecule (e.g., a peptide, hybridization triggered cross-linking agent, transport agent, hybridization-triggered cleavage agent).

[0078] The antisense molecules are delivered to cells that express a KChIP1 polypeptide in vivo. A number of methods can be used for delivering antisense DNA or RNA to cells; e.g., antisense molecules can be injected directly into the tissue site, or modified antisense molecules, designed to target the desired cells (e.g., antisense linked to peptides or antibodies that specifically bind receptors or antigens expressed on the target cell surface) can be administered systematically. Alternatively, in a another embodiment, a recombinant DNA construct is utilized in which the antisense oligonucleotide is placed under the control of a strong promoter (e.g., pol III or pol II). The use of such a construct to transfect target cells in the patient results in the transcription of sufficient amounts of single stranded RNAs that will form complementary base pairs with the endogenous transcripts and thereby prevent translation of the mRNA. For example, a vector can be introduced in vivo such that it is taken up by a cell and directs the transcription of an antisense RNA. Such a vector can remain episomal or become chromosomally integrated, as long as it can be transcribed to produce the desired antisense RNA. Such vectors can be constructed by recombinant DNA technology methods standard in the art and described above. For example, a plasmid, cosmid, YAC or viral vector can be used to prepare the recombinant DNA construct that can be introduced directly into the tissue site. Alternatively, viral vectors can be used which selectively infect the desired tissue, in which case administration may be accomplished by another route (e.g., systemically). In another embodiment of the invention, small double-stranded interfering RNA (RNA interference (RNAi)) can be used. RNAi is a post-transcription process, in which double-stranded RNA is introduced, and sequence-specific gene silencing results, though catalytic degradation of the targeted mRNA. See, e.g., Elbashir, S. M. et al., Nature 411:494-498 (2001); Lee, N. S., Nature Biotech. 19:500-505 (2002); Lee, S-K. et al., Nature Medicine 8(7):681-686 (2002); the entire teachings of these references are incorporated herein by reference.

[0079] RNAi is used routinely to investigate gene function in a high throughput fashion or to modulate gene expression in human diseases (Chi et al., PNAS, 100 (11):6343-6346 (2003)).

[0080] Introduction of long double standed RNA leads to sequence-specific degradation of homologous gene transcripts. The long double stranded RNA is metabolized to small 21-23 nucleotide siRNA (small interfering RNA). The siRNA then binds to protein complex RISC (RNA-induced silencing complex) with dual function helicase. The helicase has RNAas activity and is able to unwind the RNA. The unwound si RNA allows an antisense strand to bind to a target. This results in sequence dependent degradation of cognate mRNA. Aside from endogenous RNAi, exogenous RNAi, chemically synthesized or recombinantly produced can also be used.

[0081] Using non-intronic portions of the KChIP1 gene such as corresponding mRNA portions of SEQ ID NO: 1 , target regions of the KChIP1 gene that are accessible for RNAi are targeted and silenced. With this technique it is possible to conduct a RNAi gene walk of the nucleic acids of KChIP I and determine the amount of inhibition of the protein product. Thus, it is possible to design gene-specific therapeutics by directly targeting the mRNAs of Type II diabetes-related KChIP1 gene.

[0082] Endogenous expression of a gene product can also be reduced by inactivating or “knocking out” the gene or its promoter using targeted homologous recombination (e.g., see Smithies et al., Nature 317:230-234 (1985); Thomas & Capecchi, Cell 51:503-512 (1987); Thompson et al., Cell 5:313-321 (1989)). For example, an altered, non-functional gene (or a completely unrelated DNA sequence) flanked by DNA homologous to the endogenous gene (either the coding regions or regulatory regions of the gene) can be used, with or without a selectable marker and/or a negative selectable marker, to transfect cells that express the gene in vivo. Insertion of the DNA construct, via targeted homologous recombination, results in inactivation of the gene. The recombinant DNA constructs can be directly administered or targeted to the required site in vivo using appropriate vectors, as described above. Alternatively, expression of non-altered genes can be increased using a similar method: targeted homologous recombination can be used to insert a DNA construct comprising a non-altered functional gene, or the complement thereof, or a portion thereof, in place of an gene in the cell, as described above. In another embodiment, targeted homologous recombination can be used to insert a DNA construct comprising a nucleic acid that encodes a polypeptide variant that differs from that present in the cell.

[0083] Alternatively, endogenous expression of a gene product can be reduced by targeting deoxyribonucleotide sequences complementary to the regulatory region (i.e., the promoter and/or enhancers) to form triple helical structures that prevent transcription of the gene in target cells in the body. (See generally, Helene, C., Anticancer Drug Des., 6(6):569-84 (1991); Helene, C. et al., Ann. N.Y Acad. Sci. 660:27-36 (1992); and Maher, L. J., Bioassays 14(12):807-15 (1992)). Likewise, the antisense constructs described herein, by antagonizing the normal biological activity of the gene product, can be used in the manipulation of tissue, e.g., tissue differentiation, both in vivo and for ex vivo tissue cultures. Furthermore, the anti-sense techniques (e.g., microinjection of antisense molecules, or transfection with plasmids whose transcripts are anti-sense with regard to a nucleic acid RNA or nucleic acid sequence) can be used to investigate the role of one or more members of the KChIP1 pathway in the development of disease-related conditions. Such techniques can be utilized in cell culture, but can also be used in the creation of transgenic animals.

[0084] The therapeutic agents as described herein can be delivered in a composition, as described above, or alone. They can be administered systemically, or can be targeted to a particular tissue. The therapeutic agents can be produced by a variety of means, including chemical synthesis; recombinant production; in vivo production (e.g., a transgenic animal, such as U.S. Pat. No.: 4,873,316 to Meade et al.), for example, and can be isolated using standard means such as those described herein. In addition, a combination of any of the above methods of treatment (e.g., administration of non-altered polypeptide in conjunction with antisense therapy targeting altered mRNA; administration of a first splicing variant in conjunction with antisense therapy targeting a second splicing variant) can also be used.

[0085] The invention additionally pertains to use of such therapeutic agents, as described herein, for the manufacture of a medicament for the treatment of Type II diabetes e.g., using the methods described herein.

Monitoring Progress of Treatment

[0086] The current invention also pertains to methods of monitoring the effectiveness of treatment on the regulation of expression (e.g., relative or absolute expression) of one or more KChIP1 isoforms at the RNA or protein level or its enzymatic activity. KChIP1 message or protein or enzymatic activity can be measured in a sample of peripheral blood or cells derived therefrom. An assessment of the levels of expression or activity can be made before and during treatment with KChIP1 therapeutic agents. For example, in one embodiment of the invention, an individual who is a member of the target population can be assessed for response to treatment with a KChIP1 inhibitor, by examining calcium levels or Kv channel-interacting proteins activity or absolute and/or relative levels of KChIP1 protein or mRNA isoforms in peripheral blood in general or specific cell subfractions or combination of cell subfractions. In addition, variation such as haplotypes or mutations within or near (within 100 to 200 kb) of the KChIP1 gene may be used to identify individuals who are at higher risk for Type II diabetes to increase the power and efficiency of clinical trials for pharmaceutical agents to prevent or treat Type II diabetes. The haplotypes and other variations may be used to exclude or fractionate patients in a clinical trial who are likely to have non- KChIP1 involvement in their Type II diabetes risk in order to enrich patients who have other genes or pathways involved and boost the power and sensitivity of the clinical trial. Such variation may be used as a pharmacogenomic test to guide selection of pharmaceutical agents for individuals.

[0087] Described herein is the first known linkage study of Type II diabetes showing a connection to chromosome 5q35. Based on the linkage studies conducted, a direct relationship between Type II diabetes and the locus on chromosome 5q35, in particular the KChIP1 gene, has been discovered.

Nucleic Acids of the Invention

KChIP1 Nucleic Acids, Portions and Variants

[0088] Accordingly, the invention pertains to isolated nucleic acid molecules comprising human KChIP1 nucleic acid. The term, “KChIP1 nucleic acid,” as used herein, refers to an isolated nucleic acid molecule encoding a KChIP1 polypeptide (e.g., a KChIP1 gene, such as shown in SEQ ID NO:1). The KChIP1 nucleic acid molecules of the present invention can be RNA, for example, mRNA, or DNA, such as cDNA and genomic DNA. DNA molecules can be double-stranded or single-stranded; single stranded RNA or DNA can be either the coding, or sense, strand or the non-coding, or antisense strand. The nucleic acid molecule can include all or a portion of the coding sequence of the gene and can further comprise additional non-coding sequences such as introns and non-coding 3′ and 5′ sequences (including regulatory sequences, for example).

[0089] For example, the KChIP1 nucleic acid can the genomic sequence shown in FIG. 1, or a portion or fragment of the isolated nucleic acid molecule (e.g., cDNA or the gene) that encodes KChIP1 polypeptide. In certain embodiments, the isolated nucleic acid molecule comprises a nucleic acid molecule selected from the group consisting of SEQ ID NOs: 1 and 114-258 (e.g., in Table 10) or the complement of such a nucleic acid molecule.

[0090] Additionally, nucleic acid molecules of the invention can be fused to a marker sequence, for example, a sequence that encodes a polypeptide to assist in isolation or purification of the polypeptide. Such sequences include, but are not limited to, those that encode a glutathione-S-transferase (GST) fusion protein and those that encode a hemagglutinin A (HA) polypeptide marker from influenza.

[0091] An “isolated” nucleic acid molecule, as used herein, is one that is separated from nucleic acids that normally flank the gene or nucleotide sequence (as in genomic sequences) and/or has been completely or partially purified from other transcribed sequences (e.g., as in an RNA library). For example, an isolated nucleic acid of the invention may be substantially isolated with respect to the complex cellular milieu in which it naturally occurs, or culture medium when produced by recombinant techniques, or chemical precursors or other chemicals when chemically synthesized. In some instances, the isolated material will form part of a composition (for example, a crude extract containing other substances), buffer system or reagent mix. In other circumstances, the material may be purified to essential homogeneity, for example as determined by PAGE or column chromatography such as HPLC. Preferably, an isolated nucleic acid molecule comprises at least about 50, 80 or 90% (on a molar basis) of all macromolecular species present. With regard to genomic DNA, the term “isolated” also can refer to nucleic acid molecules that are separated from the chromosome with which the genomic DNA is naturally associated. For example, the isolated nucleic acid molecule can contain less than about 5 kb but not limited to 4 kb, 3 kb, 2 kb, 1 kb, 0.5 kb or 0.1 kb of nucleotides which flank the nucleic acid molecule in the genomic DNA of the cell from which the nucleic acid molecule is derived.

[0092] The nucleic acid molecule can be fused to other coding or regulatory sequences and still be considered isolated. Thus, recombinant DNA contained in a vector is included in the definition of “isolated” as used herein. Also, isolated nucleic acid molecules include recombinant DNA molecules in heterologous host cells, as well as partially or substantially purified DNA molecules in solution. “Isolated” nucleic acid molecules also encompass in vivo and in vitro RNA transcripts of the DNA molecules of the present invention. An isolated nucleic acid molecule can include a nucleic acid molecule or nucleic acid sequence that is synthesized chemically or by recombinant means. Therefore, recombinant DNA contained in a vector is included in the definition of “isolated” as used herein. Also, isolated nucleic acid molecules include recombinant DNA molecules in heterologous organisms, as well as partially or substantially purified DNA molecules in solution. In vivo and in vitro RNA transcripts of the DNA molecules of the present invention are also encompassed by “isolated” nucleic acid sequences. Such isolated nucleic acid molecules are useful in the manufacture of the encoded polypeptide, as probes for isolating homologous sequences (e.g., from other mammalian species), for gene mapping (e.g., by in situ hybridization with chromosomes), or for detecting expression of the gene in tissue (e.g., human tissue), such as by Northern blot analysis.

[0093] The present invention also pertains to nucleic acid molecules which are not necessarily found in nature but which encode a KChIP1 polypeptide, or another splicing variant of a KChIP1 polypeptide or polymorphic variant thereof. Thus, for example, the invention pertains to DNA molecules comprising a sequence that is different from the naturally occurring nucleotide sequence but which, due to the degeneracy of the genetic code, encode a KChIP1 polypeptide of the present invention. The invention also encompasses nucleic acid molecules encoding portions (fragments), or encoding variant polypeptides such as analogues or derivatives of a KChIP1 polypeptide. Such variants can be naturally occurring, such as in the case of allelic variation or single nucleotide polymorphisms, or non-naturally-occurring, such as those induced by various mutagens and mutagenic processes. Intended variations include, but are not limited to, addition, deletion and substitution of one or more nucleotides that can result in conservative or non-conservative amino acid changes, including additions and deletions. Preferably the nucleotide (and/or resultant amino acid) changes are silent or conserved; that is, they do not alter the characteristics or activity of a KChIP1 polypeptide. In one embodiment, the nucleic acid sequences are fragments that comprise one or more polymorphic microsatellite markers. In another embodiment, the nucleotide sequences are fragments that comprise one or more single nucleotide polymorphisms in a KChIP1 gene.

[0094] Other alterations of the nucleic acid molecules of the invention can include, for example, labeling, methylation, internucleotide modifications such as uncharged linkages (e.g., methyl phosphonates, phosphotriesters, phosphoamidates, carbamates), charged linkages (e.g., phosphorothioates, phosphorodithioates), pendent moieties (e.g., polypeptides), intercalators (e.g., acridine, psoralen), chelators, alkylators, and modified linkages (e.g., alpha anomeric nucleic acids). Also included are synthetic molecules that mimic nucleic acid molecules in the ability to bind to a designated sequence via hydrogen bonding and other chemical interactions. Such molecules include, for example, those in which peptide linkages substitute for phosphate linkages in the backbone of the molecule.

[0095] The invention also pertains to nucleic acid molecules that hybridize under high stringency hybridization conditions, such as for selective hybridization, to a nucleotide sequence described herein (e.g., nucleic acid molecules which specifically hybridize to a nucleotide sequence encoding polypeptides described herein, and, optionally, have an activity of the polypeptide). In one embodiment, the invention includes variants described herein which hybridize under high stringency hybridization conditions (e.g., for selective hybridization) to a nucleotide sequence comprising a nucleotide sequence selected from the group consisting of SEQ ID NOs: 114-258. In another embodiment, the invention includes variants described herein that hybridize under high stringency hybridization conditions (e.g., for selective hybridization) to a nucleotide sequence encoding an amino acid sequence or a polymorphic variant thereof. In another embodiment, the variant that hybridizes under high stringency hybridizations has an activity of a KChIP1 polypeptide.

[0096] Such nucleic acid molecules can be detected and/or isolated by specific hybridization (e.g., under high stringency conditions). “Specific hybridization,” as used herein, refers to the ability of a first nucleic acid to hybridize to a second nucleic acid in a manner such that the first nucleic acid does not hybridize to any nucleic acid other than to the second nucleic acid (e.g., when the first nucleic acid has a higher similarity to the second nucleic acid than to any other nucleic acid in a sample wherein the hybridization is to be performed). “Stringency conditions” for hybridization is a term of art which refers to the incubation and wash conditions, e.g., conditions of temperature and buffer concentration, which permit hybridization of a particular nucleic acid to a second nucleic acid; the first nucleic acid may be perfectly (i.e., 100%) complementary to the second, or the first and second may share some degree of complementarity which is less than perfect (e.g., 70%, 75%, 85%, 90%, 95%). For example, certain high stringency conditions can be used which distinguish perfectly complementary nucleic acids from those of less complementarity. “High stringency conditions”, “moderate stringency conditions” and “low stringency conditions” for nucleic acid hybridizations are explained on pages 2.10.1-2.10:16 and pages 6.3.1-6.3.6 in Current Protocols in Molecular Biology (Ausubel, F. M. et al., “Current Protocols in Molecular Biology”, John Wiley & Sons, (2001)), the entire teachings of which are incorporated by reference herein). The exact conditions which determine the stringency of hybridization depend not only on ionic strength (e.g., 0.2×SSC, 0.1×SSC), temperature (e.g., room temperature, 42° C., 68° C.) and the concentration of destabilizing agents such as formamide or denaturing agents such as SDS, but also on factors such as the length of the nucleic acid sequence, base composition, percent mismatch between hybridizing sequences and the frequency of occurrence of subsets of that sequence within other non-identical sequences. Thus, equivalent conditions can be determined by varying one or more of these parameters while maintaining a similar degree of identity or similarity between the two nucleic acid molecules. Typically, conditions are used such that sequences at least about 60%, at least about 70%, at least about 80%, at least about 90%, or at least about 95% or more identical to each other remain hybridized to one another. By varying hybridization conditions from a level of stringency at which no hybridization occurs to a level at which hybridization is first observed, conditions which will allow a given sequence to hybridize (e.g., selectively) with the most similar sequences in the sample can be determined.

[0097] Exemplary conditions are described in Krause, M. H. and S. A. Aaronson, Methods in Enzymology 200:546-556 (1991), and in, Ausubel, et al., “Current Protocols in Molecular Biology”, John Wiley & Sons, (2001), which describes the determination of washing conditions for moderate or low stringency conditions. Washing is the step in which conditions are usually set so as to determine a minimum level of complementarity of the hybrids. Generally, starting from the lowest temperature at which only homologous hybridization occurs, each ° C. by which the final wash temperature is reduced (holding SSC concentration constant) allows an increase by 1% in the maximum extent of mismatching among the sequences that hybridize. Generally, doubling the concentration of SSC results in an increase in Tₘ of −17° C. Using these guidelines, the washing temperature can be determined empirically for high, moderate or low stringency, depending on the level of mismatch sought.

[0098] For example, a low stringency wash can comprise washing in a solution containing 0.2×SSC/0.1% SDS for 10 minutes at room temperature; a moderate stringency wash can comprise washing in a pre-warmed solution (42° C.) solution containing 0.2×SSC/0.1% SDS for 15 minutes at 42° C.; and a high stringency wash can comprise washing in pre-warmed (68° C.) solution containing 0.1×SSC/0.1% SDS for 15 minutes at 68° C. Furthermore, washes can be performed repeatedly or sequentially to obtain a desired result as known in the art. Equivalent conditions can be determined by varying one or more of the parameters given as an example, as known in the art, while maintaining a similar degree of identity or similarity between the target nucleic acid molecule and the primer or probe used.

[0099] The percent homology or identity of two nucleotide or amino acid sequences can be determined by aligning the sequences for optimal comparison purposes (e.g., gaps can be introduced in the sequence of a first sequence for optimal alignment). The nucleotides or amino acids at corresponding positions are then compared, and the percent identity between the two sequences is a function of the number of identical positions shared by the sequences (i.e., % identity=# of identical positions/total # of positions×100). When a position in one sequence is occupied by the same nucleotide or amino acid residue as the corresponding position in the other sequence, then the molecules are homologous at that position. As used herein, nucleic acid or amino acid “homology” is equivalent to nucleic acid or amino acid “identity”. In certain embodiments, the length of a sequence aligned for comparison purposes is at least 30%, for example, at least 40%, in certain embodiments at least 60%, and in other embodiments at least 70%, 80%, 90% or 95% of the length of the reference sequence. The actual comparison of the two sequences can be accomplished by well-known methods, for example, using a mathematical algorithm. A preferred, non-limiting example of such a mathematical algorithm is described in Karlin et al., Proc. Natl. Acad. Sci. USA 90:5873-5877 (1993). Such an algorithm is incorporated into the NBLAST and XBLAST programs (version 2.0) as described in Altschul et al., Nucleic Acids Res. 25:389-3402 (1997). When utilizing BLAST and Gapped BLAST programs, the default parameters of the respective programs (e.g., NBLAST) can be used. In one embodiment, parameters for sequence comparison can be set at score=100, wordlength=12, or can be varied (e.g., W=5 or W=20).

[0100] Another preferred, non-limiting example of a mathematical algorithm utilized for the comparison of sequences is the algorithm of Myers and Miller, CABIOS 4(1): 11-17 (1988). Such an algorithm is incorporated into the ALIGN program (version 2.0) which is part of the GCG sequence alignment software package (Accelrys, Cambridge, UK). When utilizing the ALIGN program for comparing amino acid sequences, a PAM120 weight residue table, a gap length penalty of 12, and a gap penalty of 4 can be used. Additional algorithms for sequence analysis are known in the art and include ADVANCE and ADAM as described in Torellis and Robotti, Comput. Appl. Biosci. 10:3-5 (1994); and FASTA described in Pearson and Lipman, Proc. Natl. Acad. Sci. USA 85:2444-8 (1988).

[0101] In another embodiment, the percent identity between two amino acid sequences can be accomplished using the GAP program in the GCG software package using either a BLOSUM63 matrix or a PAM250 matrix, and a gap weight of 12, 10, 8, 6, or 4 and a length weight of 2, 3, or 4. In yet another embodiment, the percent identity between two nucleic acid sequences can be accomplished using the GAP program in the GCG software package using a gap weight of 50 and a length weight of 3.

[0102] The present invention also provides isolated nucleic acid molecules that contain a fragment or portion that hybridizes under highly stringent conditions to a nucleotide sequence comprising a nucleotide sequence selected from the group consisting of SEQ ID NOs: 1, 114-258, or the complement of such a sequence, and also provides isolated nucleic acid molecules that contain a fragment or portion that hybridizes under highly stringent conditions to a nucleotide sequence encoding an amino acid sequence or polymorphic variant thereof. The nucleic acid fragments of the invention are at least about 15, preferably at least about 18, 20, 23 or 25 nucleotides, and can be 30, 40, 50, 100, 200 or more nucleotides in length. Longer fragments, for example, 30 or more nucleotides in length, that encode antigenic polypeptides described herein are particularly useful, such as for the generation of antibodies as described below.

Probes and Primers

[0103] In a related aspect, the nucleic acid fragments of the invention are used as probes or primers in assays such as those described herein. “Probes” or “primers” are oligonucleotides that hybridize in a base-specific manner to a complementary strand of nucleic acid molecules. Such probes and primers include polypeptide nucleic acids, as described in Nielsen et al., Science 254:1497-1500 (1991).

[0104] A probe or primer comprises a region of nucleotide sequence that hybridizes to at least about 15, for example about 20-25, and in certain embodiments about 40, 50 or 75, consecutive nucleotides of a nucleic acid molecule comprising a contiguous nucleotide sequence selected from the group consisting of SEQ ID NOs: 1, 114-258 or polymorphic variant thereof. In other embodiments, a probe or primer comprises 100 or fewer nucleotides, in certain embodiments from 6 to 50 nucleotides, for example from 12 to 30 nucleotides. In other embodiments, the probe or primer is at least 70% identical to the contiguous nucleotide sequence or to the complement of the contiguous nucleotide sequence, for example at least 80% identical, in certain embodiments at least 90% identical, and in other embodiments at least 95% identical, or even capable of selectively hybridizing to the contiguous nucleotide sequence or to the complement of the contiguous nucleotide sequence. Often, the probe or primer further comprises a label, e.g., radioisotope, fluorescent compound, enzyme, or enzyme co-factor.

[0105] The nucleic acid molecules of the invention such as those described above can be identified and isolated using standard molecular biology techniques and the sequence information provided herein. For example, nucleic acid molecules can be amplified and isolated by the polymerase chain reaction using synthetic oligonucleotide primers designed based on one or more of the sequences selected from the group consisting of SEQ ID NOs: 1, 114-258 or the complement of such a sequence, or designed based on nucleotides based on sequences encoding one or more of the amino acid sequences provided herein. See generally PCR Technology: Principles and Applications for DNA Amplification (ed. H. A. Erlich, Freeman Press, NY, N.Y., 1992); PCR Protocols. A Guide to Methods and Applications (Eds. Innis et al., Academic Press, San Diego, Calif., 1990); Mattila et al., Nucl. Acids Res. 19: 4967 (I 991); Eckert et al., PCR Methods and Applications 1:17 (1991); PCR (eds. McPherson et al., IRL Press, Oxford); and U.S. Pat. No. 4,683,202. The nucleic acid molecules can be amplified using cDNA, mRNA or genomic DNA as a template, cloned into an appropriate vector and characterized by DNA sequence analysis.

[0106] Other suitable amplification methods include the ligase chain reaction (LCR) (see Wu and Wallace, Genomics 4:560 (1989), Landegren et al., Science 241:1077 (1988), transcription amplification (Kwoh et al., Proc. Natl. Acad. Sci. USA 86:1173 (1989)), and self-sustained sequence replication (Guatelli et al., Proc. Nat. Acad. Sci. USA 87:1874 (1990)) and nucleic acid based sequence amplification (NASBA). The latter two amplification methods involve isothermal reactions based on isothermal transcription, which produce both single stranded RNA (ssRNA) and double stranded DNA (dsDNA) as the amplification products in a ratio of about 30 or 100 to 1, respectively.

[0107] The amplified DNA can be labeled, for example, radiolabeled, and used as a probe for screening a cDNA library derived from human cells, mRNA in zap express, ZIPLOX or other suitable vector. Corresponding clones can be isolated, DNA can obtained following in vivo excision, and the cloned insert can be sequenced in either or both orientations by art recognized methods to identify the correct reading frame encoding a polypeptide of the appropriate molecular weight. For example, the direct analysis of the nucleotide sequence of nucleic acid molecules of the present invention can be accomplished using well-known methods that are commercially available. See, for example, Sambrook et al., Molecular Cloning, A Laboratory Manual (2nd Ed., CSHP, New York 1989); Zyskind et al., Recombinant DNA Laboratory Manual, (Acad. Press, 1988)). Additionally, fluorescence methods are also available for analyzing nucleic acids (Chen et al., Genome Res. 9, 492 (1999)) and polypeptides. Using these or similar methods, the polypeptide and the DNA encoding the polypeptide can be isolated, sequenced and further characterized.

[0108] Antisense nucleic acid molecules of the invention can be designed using the nucleotide sequences of one or more of SEQ ID NOs: 1, 114-258 and/or the complement of one or more of SEQ ID NOs: 1, 114-258 and/or a portion of one or more of SEQ ID NOs: 1, 114-258 or the complement of one or more of SEQ ID NOs: 1, 114-258 and constructed using chemical synthesis and enzymatic ligation reactions using procedures known in the art. For example, an antisense nucleic acid molecule (e.g., an antisense oligonucleotide) can be chemically synthesized using naturally occurring nucleotides or variously modified nucleotides designed to increase the biological stability of the molecules or to increase the physical stability of the duplex formed between the anti sense and sense nucleic acids, e.g., phosphorothioate derivatives and acridine substituted nucleotides can be used. Alternatively, the antisense nucleic acid molecule can be produced biologically using an expression vector into which a nucleic acid molecule has been subdloned in an antisense orientation (i.e., RNA transcribed from the inserted nucleic acid molecule will be of an antisense orientation to a target nucleic acid of interest).

[0109] The nucleic acid sequences can also be used to compare with endogenous DNA sequences in patients to identify one or more of the disorders described above, and as probes, such as to hybridize and discover related DNA sequences or to subtract out known sequences from a sample. The nucleic acid sequences can further be used to derive primers for genetic fingerprinting, to raise anti-polypeptide antibodies using DNA immunization techniques, and as an antigen to raise anti-DNA antibodies or elicit immune responses. Portions or fragments of the nucleotide sequences identified herein (and the corresponding complete gene sequences) can be used in numerous ways as polynucleotide reagents. For example, these sequences can be used to: (i) map their respective genes on a chromosome; and, thus, locate gene regions associated with genetic disease; (ii) identify an individual from a minute biological sample (tissue typing); and (iii) aid in forensic identification of a biological sample. Additionally, the nucleotide sequences of the invention can be used to identify and express recombinant polypeptides for analysis, characterization or therapeutic use, or as markers for tissues in which the corresponding polypeptide is expressed, either constitutively, during tissue differentiation, or in diseased states. The nucleic acid sequences can additionally be used as reagents in the screening and/or diagnostic assays described herein, and can also be included as components of kits (e.g., reagent kits) for use in the screening and/or diagnostic assays described herein.

Vectors and Host Cells

[0110] Another aspect of the invention pertains to nucleic acid constructs containing a nucleic acid molecule selected from the group consisting of SEQ ID NOs: 1, 114-258 and the complements thereof (or a portion thereof). The constructs comprise a vector (e.g., an expression vector) into which a sequence of the invention has been inserted in a sense or antisense orientation. As used herein, the term “vector” refers to a nucleic acid molecule capable of transporting another nucleic acid to which it has been linked. One type of vector is a “plasmid”, which refers to a circular double stranded DNA loop into which additional DNA segments can be ligated. Another type of vector is a viral vector, wherein additional DNA segments can be ligated into the viral genome. Certain vectors are capable of autonomous replication in a host cell into which they are introduced (e.g., bacterial vectors having a bacterial origin of replication and episomal mammalian vectors). Other vectors (e.g., non-episomal mammalian vectors) are integrated into the genome of a host cell upon introduction into the host cell, and thereby are replicated along with the host genome. Expression vectors are capable of directing the expression of genes to which they are operably linked. In general, expression vectors of utility in recombinant DNA techniques are often in the form of plasmids. However, the invention is intended to include such other forms of expression vectors, such as viral vectors (e.g., replication defective retroviruses, adenoviruses and adeno-associated viruses) that serve equivalent functions.

[0111] In certain embodiments, recombinant expression vectors of the invention comprise a nucleic acid molecule of the invention in a form suitable for expression of the nucleic acid molecule in a host cell. This means that the recombinant expression vectors include one or more regulatory sequences, selected on the basis of the host cells to be used for expression, which is operably linked to the nucleic acid sequence to be expressed. Within a recombinant expression vector, “operably linked” or “operatively linked” is intended to mean that the nucleotide sequence of interest is linked to the regulatory sequence(s) in a manner which allows for expression of the nucleotide sequence (e.g., in an in vitro transcription/translation system or in a host cell when the vector is introduced into the host cell). The term “regulatory sequence” is intended to include promoters, enhancers and other expression control elements (e.g., polyadenylation signals). Such regulatory sequences are described, for example, in Goeddel, “Gene Expression Technology”, Methods in Enzymology 185, Academic Press, San Diego, Calif. (1990). Regulatory sequences include those which direct constitutive expression of a nucleotide sequence in many types of host cell and those which direct expression of the nucleotide sequence only in certain host cells (e.g., tissue-specific regulatory sequences). It will be appreciated by those skilled in the art that the design of the expression vector can depend on such factors as the choice of the host cell to be transformed and the level of expression of polypeptide desired. The expression vectors of the invention can be introduced into host cells to thereby produce polypeptides, including fusion polypeptides, encoded by nucleic acid molecules as described herein.

[0112] The recombinant expression vectors of the invention can be designed for expression of a polypeptide of the invention in prokaryotic or eukaryotic cells, e.g., bacterial cells such as E. coli, insect cells (using baculovirus expression vectors), yeast cells or mammalian cells. Suitable host cells are discussed further in Goeddel, supra. Alternatively, the recombinant expression vector can be transcribed and translated in vitro, for example using T7 promoter regulatory sequences and T7 polymerase.

[0113] Another aspect of the invention pertains to host cells into which a recombinant expression vector of the invention has been introduced. The terms “host cell” and “recombinant host cell” are used interchangeably herein. It is understood that such terms refer not only to the particular subject cell but also to the progeny or potential progeny of such a cell. Because certain modifications may occur in succeeding generations due to either mutation or environmental influences, such progeny may not, in fact, be identical to the parent cell, but are still included within the scope of the term as used herein.

[0114] A host cell can be any prokaryotic or eukaryotic cell. For example, a nucleic acid molecule of the invention can be expressed in bacterial cells (e.g., E. coli), insect cells, yeast or mammalian cells (such as Chinese hamster ovary cells (CHO) or COS cells). Other suitable host cells are known to those skilled in the art.

[0115] Vector DNA can be introduced into prokaryotic or eukaryotic cells via conventional transformation or transfection techniques. As used herein, the terms “transformation” and “transfection” are intended to refer to a variety of art-recognized techniques for introducing a foreign nucleic acid molecule (e.g., DNA) into a host cell, including calcium phosphate or calcium chloride co-precipitation, DEAE-dextran-mediated transfection, lipofection, or electroporation. Suitable methods for transforming or transfecting host cells can be found in Sambrook, et al., (supra), and other laboratory manuals.

[0116] For stable transfection of mammalian cells, it is known that, depending upon the expression vector and transfection technique used, only a small fraction of cells may integrate the foreign DNA into their genome. In order to identify and select these integrants, a gene that encodes a selectable marker (e.g., for resistance to antibiotics) is generally introduced into the host cells along with the gene of interest. Preferred selectable markers include those that confer resistance to drugs, such as G418, hygromycin and methotrexate. Nucleic acid molecules encoding a selectable marker can be introduced into a host cell on the same vector as the nucleic acid molecule of the invention or can be introduced on a separate vector. Cells stably transfected with the introduced nucleic acid molecule can be identified by drug selection (e.g., cells that have incorporated the selectable marker gene will survive, while the other cells die).

[0117] A host cell of the invention, such as a prokaryotic or eukaryotic host cell in culture, can be used to produce (i.e., express) a polypeptide of the invention. Accordingly, the invention further provides methods for producing a polypeptide using the host cells of the invention. In one embodiment, the method comprises culturing the host cell of invention (into which a recombinant expression vector encoding a polypeptide of the invention has been introduced) in a suitable medium such that the polypeptide is produced. In another embodiment, the method further comprises isolating the polypeptide from the medium or the host cell.

[0118] The host cells of the invention can also be used to produce nonhuman transgenic animals. For example, in one embodiment, a host cell of the invention is a fertilized oocyte or an embryonic stem cell into which a nucleic acid molecule of the invention has been introduced (e.g., an exogenous KChIP1 gene, or an exogenous nucleic acid encoding a KChIP1 polypeptide). Such host cells can then be used to create non-human transgenic animals in which exogenous nucleotide sequences have been introduced into the genome or homologous recombinant animals in which endogenous nucleotide sequences have been altered. Such animals are useful for studying the function and/or activity of the nucleotide sequence and polypeptide encoded by the sequence and for identifying and/or evaluating modulators of their activity. As used herein, a “transgenic animal” is a non-human animal, preferably a mammal, more preferably a rodent such as a rat or mouse, in which one or more of the cells of the animal include a transgene. Other examples of transgenic animals include non-human primates, sheep, dogs, cows, goats, chickens and amphibians. A transgene is exogenous DNA which is integrated into the genome of a cell from which a transgenic animal develops and which remains in the genome of the mature animal, thereby directing the expression of an encoded gene product in one or more cell types or tissues of the transgenic animal. As used herein, an “homologous recombinant animal” is a non-human animal, preferably a mammal, more preferably a mouse, in which an endogenous gene has been altered by homologous recombination between the endogenous gene and an exogenous DNA molecule introduced into a cell of the animal, e.g., an embryonic cell of the animal, prior to development of the animal.

[0119] Methods for generating transgenic animals via embryo manipulation and microinjection, particularly animals such as mice, have become conventional in the art and are described, for example, in U.S. Pat. Nos. 4,736,866 and 4,870,009, U.S. Pat. No.: 4,873,191 and in Hogan, Manipulating the Mouse Embryo (Cold Spring Harbor Laboratory Press, Cold Spring Harbor, N.Y., 1986). Methods for constructing homologous recombination vectors and homologous recombinant animals are described further in Bradley, Current Opinion in BioTechnology 2:823-829 (1991) and in PCT Publication Nos. WO 90/11354, WO 91/01140, WO 92/0968, and WO 93/04169. Clones of the non-human transgenic animals described herein can also be produced according to the methods described in Wilmut et al., Nature 385:810-813 (1997) and PCT Publication Nos. WO 97/07668 and WO 97/07669.

Polypeptides of the Invention

[0120] The present invention also pertains to isolated polypeptides encoded by KChIP1 nucleic acids (“KChIP1 polypeptides,” or “KChIP1 proteins,” such as the protein shown in SEQ ID NO: 2) and fragments and variants thereof, as well as polypeptides encoded by nucleotide sequences described herein (e.g., other splicing variants). The term “polypeptide” refers to a polymer of amino acids, and not to a specific length; thus, peptides, oligopeptides and proteins are included within the definition of a polypeptide. As used herein, a polypeptide is said to be “isolated” or “purified” when it is substantially free of cellular material when it is isolated from recombinant and non-recombinant cells, or free of chemical precursors or other chemicals when it is chemically synthesized. A polypeptide, however, can be joined to another polypeptide with which it is not normally associated in a cell (e.g., in a “fusion protein”) and still be “isolated” or “purified.”

[0121] The polypeptides of the invention can be purified to homogeneity. It is understood, however, that preparations in which the polypeptide is not purified to homogeneity are useful. The critical feature is that the preparation allows for the desired function of the polypeptide, even in the presence of considerable amounts of other components. Thus, the invention encompasses various degrees of purity. In one embodiment, the language “substantially free of cellular material” includes preparations of the polypeptide having less than about 30% (by dry weight) other proteins (i.e., contaminating protein), less than about 20% other proteins, less than about 10% other proteins, or less than about 5% other proteins.

[0122] When a polypeptide is recombinantly produced, it can also be substantially free of culture medium, i.e., culture medium represents less than about 20%, less than about 10%, or less than about 5% of the volume of the polypeptide preparation. The language “substantially free of chemical precursors or other chemicals” includes preparations of the polypeptide in which it is separated from chemical precursors or other chemicals that are involved in its synthesis. In one embodiment, the language “substantially free of chemical precursors or other chemicals” includes preparations of the polypeptide having less than about 30% (by dry weight) chemical precursors or other chemicals, less than about 20% chemical precursors or other chemicals, less than about 10% chemical precursors or other chemicals, or less than about 5% chemical precursors or other chemicals.

[0123] In one embodiment, a polypeptide of the invention comprises an amino acid sequence encoded by a nucleic acid molecule comprising a nucleotide sequence of SEQ ID NO: 1, optionally additionally comprising one or more of SEQ ID NOs: 114-258; or the complement of such a nucleic acid, or portions thereof, or a portion or polymorphic variant thereof. However, the polypeptides of the invention also encompass fragment and sequence variants. Variants include a substantially homologous polypeptide encoded by the same genetic locus in an organism, i.e., an allelic variant, as well as other splicing variants. Variants also encompass polypeptides derived from other genetic loci in an organism, but having substantial homology to a polypeptide encoded by a nucleic acid molecule comprising a nucleotide of SEQ ID NO: 1, optionally additionally one or more of SEQ ID NOs: 114-258; or a complement of such a sequence, or portions thereof or polymorphic variants thereof. Variants also include polypeptides substantially homologous or identical to these polypeptides but derived from another organism, i.e., an ortholog. Variants also include polypeptides that are substantially homologous or identical to these polypeptides that are produced by chemical synthesis. Variants also include polypeptides that are substantially homologous or identical to these polypeptides that are produced by recombinant methods.

[0124] As used herein, two polypeptides (or a region of the polypeptides) are substantially homologous or identical when the amino acid sequences are at least about 45-55%, in certain embodiments at least about 70-75%, and in other embodiments at least about 80-85%, and in other embodiments greater than about 90% or more homologous or identical. A substantially homologous amino acid sequence, according to the present invention, will be encoded by a nucleic acid molecule hybridizing to of SEQ ID NO: 1 or any one of 114-258 or portion thereof, under stringent conditions as more particularly described above, or will be encoded by a nucleic acid molecule hybridizing to a nucleic acid sequence encoding SEQ ID NO: 1 or any one of 114-258 or a portion thereof or polymorphic variant thereof, under stringent conditions as more particularly described thereof.

[0125] The invention also encompasses polypeptides having a lower degree of identity but having sufficient similarity so as to perform one or more of the same functions performed by a polypeptide encoded by a nucleic acid molecule of the invention.

[0126] Similarity is determined by conserved amino acid substitution where a given amino acid in a polypeptide is substituted by another amino acid of like characteristics. Conservative substitutions are likely to be phenotypically silent. Typically seen as conservative substitutions are the replacements, one for another, among the aliphatic amino acids Ala, Val, Leu and Ile; interchange of the hydroxyl residues Ser and Thr, exchange of the acidic residues Asp and Glu, substitution between the amide residues Asn and Gln, exchange of the basic residues Lys and Arg and replacements among the aromatic residues Phe and Tyr. Guidance concerning which amino acid changes are likely to be phenotypically silent are found in Bowie et al., Science 247:1306-1310 (1990).

[0127] A variant polypeptide can differ in amino acid sequence by one or more substitutions, deletions, insertions, inversions, fusions, and truncations or a combination of any of these. Further, variant polypeptides can be fully functional or can lack function in one or more activities. Fully functional variants typically contain only conservative variation or variation in non-critical residues or in non-critical regions. Functional variants can also contain substitution of similar amino acids that result in no change or an insignificant change in function. Alternatively, such substitutions may positively or negatively affect function to some degree. Non-functional variants typically contain one or more non-conservative amino acid substitutions, deletions, insertions, inversions, or truncation or a substitution, insertion, inversion, or deletion in a critical residue or critical region.

[0128] Amino acids that are essential for function can be identified by methods known in the art, such as site-directed mutagenesis or alanine-scanning mutagenesis (Cunningham et al., Science 244:1082-1185 (1989)). The latter procedure introduces single alanine mutations at every residue in the molecule. The resulting mutant molecules are then tested for biological activity in vitro, or in vitro proliferative activity. Sites that are critical for polypeptide activity can also be determined by structural analysis such as crystallization, nuclear magnetic resonance or photoaffinity labeling (Smith et al., J. Mol. Biol. 224:899-904 (1992); de Vos et al., Science 255:306-312 (1992)).

[0129] The invention also includes polypeptide fragments of the polypeptides of the invention. Fragments can be derived from a polypeptide encoded by a nucleic acid molecule comprising SEQ ID NO: 1 and optionally comprising one or more of SEQ ID NOs: 114-258; or a complement of such a nucleic acid or other variants. However, the invention also encompasses fragments of the variants of the polypeptides described herein. As used herein, a fragment comprises at least 6 contiguous amino acids. Useful fragments include those that retain one or more of the biological activities of the polypeptide as well as fragments that can be used as an immunogen to generate polypeptide-specific antibodies.

[0130] Biologically active fragments (peptides which are, for example, 6, 9, 12, 15, 16, 20, 30, 35, 36, 37, 38, 39, 40, 50, 100 or more amino acids in length) can comprise a domain, segment, or motif that has been identified by analysis of the polypeptide sequence using well-known methods, e.g., signal peptides, extracellular domains, one or more transmembrane segments or loops, ligand binding regions, zinc finger domains, DNA binding domains, acylation sites, glycosylation sites, or phosphorylation sites.

[0131] Fragments can be discrete (not fused to other amino acids or polypeptides) or can be within a larger polypeptide. Further, several fragments can be comprised within a single larger polypeptide. In one embodiment a fragment designed for expression in a host can have heterologous pre- and pro-polypeptide regions fused to the amino terminus of the polypeptide fragment and an additional region fused to the carboxyl terminus of the fragment.

[0132] The invention thus provides chimeric or fusion polypeptides. These comprise a polypeptide of the invention operatively linked to a heterologous protein or polypeptide having an amino acid sequence not substantially homologous to the polypeptide.

[0133] “Operatively linked” indicates that the polypeptide and the heterologous protein are fused in-frame. The heterologous protein can be fused to the N-terminus or C-terminus of the polypeptide. In one embodiment the fusion polypeptide does not affect function of the polypeptide per se. For example, the fusion polypeptide can be a GST-fusion polypeptide in which the polypeptide sequences are fused to the C-terminus of the GST sequences. Other types of fusion polypeptides include, but are not limited to, enzymatic fusion polypeptides, for example beta-galactosidase fusions, yeast two-hybrid GAL fusions, poly-His fusions and Ig fusions. Such fusion polypeptides, particularly poly-His fusions, can facilitate the purification of recombinant polypeptide. In certain host cells (e.g., mammalian host cells), expression and/or secretion of a polypeptide can be increased using a heterologous signal sequence. Therefore, in another embodiment, the fusion polypeptide contains a heterologous signal sequence at its N-terminus.

[0134] EP-A-O 464 533 discloses fusion proteins comprising various portions of immunoglobulin constant regions. The Fc is useful in therapy and diagnosis and thus results, for example, in improved pharmacokinetic properties (EP-A 0232 262). In drug discovery, for example, human proteins have been fused with Fc portions for the purpose of high-throughput screening assays to identify antagonists. Bennett et al., Journal of Molecular Recognition, 8:52-58 (1995) and Johanson et al., The Journal of Biological Chemistry, 270,16:9459-9471 (1995). Thus, this invention also encompasses soluble fusion polypeptides containing a polypeptide of the invention and various portions of the constant regions of heavy or light chains of immunoglobulins of various subclasses (IgG, IgM, IgA, IgE).

[0135] A chimeric or fusion polypeptide can be produced by standard recombinant DNA techniques. For example, DNA fragments coding for the different polypeptide sequences are ligated together in-frame in accordance with conventional techniques. In another embodiment, the fusion gene can be synthesized by conventional techniques including automated DNA synthesizers. Alternatively, PCR amplification of nucleic acid fragments can be carried out using anchor primers which give rise to complementary overhangs between two consecutive nucleic acid fragments which can subsequently be annealed and re-amplified to generate a chimeric nucleic acid sequence (see Ausubel et al., Current Protocols in Molecular Biology, 1992).

[0136] Moreover, many expression vectors are commercially available that already encode a fusion moiety (e.g., a GST protein). A nucleic acid molecule encoding a polypeptide of the invention can be cloned into such an expression vector such that the fusion moiety is linked in-frame to the polypeptide.

[0137] The isolated polypeptide can be purified from cells that naturally express it, can be purified from cells that have been altered to express it (recombinant), or synthesized using known protein synthesis methods. In one embodiment, the polypeptide is produced by recombinant DNA techniques. For example, a nucleic acid molecule encoding the polypeptide is cloned into an expression vector, the expression vector introduced into a host cell and the polypeptide expressed in the host cell. The polypeptide can then be isolated from the cells by an appropriate purification scheme using standard protein purification techniques.

[0138] The polypeptides of the present invention can be used to raise antibodies or to elicit an immune response. The polypeptides can also be used as a reagent, e.g., a labeled reagent, in assays to quantitatively determine levels of the polypeptide or a molecule to which it binds (e.g., a ligand) in biological fluids. The polypeptides can also be used as markers for cells or tissues in which the corresponding polypeptide is preferentially expressed, either constitutively, during tissue differentiation, or in a diseased state. The polypeptides can be used to isolate a corresponding binding agent, e.g., ligand or receptor, such as, for example, in an interaction trap assay, and to screen for peptide or small molecule antagonists or agonists of the binding interaction.

Antibodies of the Invention

[0139] Polyclonal antibodies and/or monoclonal antibodies that specifically bind one form of the gene product but not to the other form of the gene product are also provided. Antibodies are also provided which bind a portion of either the variant or the reference gene product that contains the polymorphic site or sites. The term “antibody” as used herein refers to immunoglobulin molecules and immunologically active portions of immunoglobulin molecules, i.e., molecules that contain an antigen binding site that specifically bind an antigen. A molecule that specifically binds to a polypeptide of the invention is a molecule that binds to that polypeptide or a fragment thereof, but does not substantially bind other molecules in a sample, e.g., a biological sample, which naturally contains the polypeptide. Examples of immunologically active portions of immunoglobulin molecules include F(ab) and F(ab′)₂ fragments which can be generated by treating the antibody with an enzyme such as pepsin. The invention provides polyclonal and monoclonal antibodies that bind to a polypeptide of the invention. The term “monoclonal antibody” or “monoclonal antibody composition”, as used herein, refers to a population of antibody molecules that contain only one species of an antigen binding site capable of immunoreacting with a particular epitope of a polypeptide of the invention. A monoclonal antibody composition thus typically displays a single binding affinity for a particular polypeptide of the invention with which it immunoreacts.

[0140] Polyclonal antibodies can be prepared as described above by immunizing a suitable subject with a desired immunogen, e.g., polypeptide of the invention or a fragment thereof. The antibody titer in the immunized subject can be monitored over time by standard techniques, such as with an enzyme linked immunosorbent assay (ELISA) using immobilized polypeptide. If desired, the antibody molecules directed against the polypeptide can be isolated from the mammal (e.g., from the blood) and further purified by well-known techniques, such as protein A chromatography to obtain the IgG fraction. At an appropriate time after immunization, e.g., when the antibody titers are highest, antibody-producing cells can be obtained from the subject and used to prepare monoclonal antibodies by standard techniques, such as the hybridoma technique originally described by Kohler and Milstein, Nature 256:495-497 (1975), the human B cell hybridoma technique (Kozbor et al., Immunol. Today 4: 72 (1983)), the EBV-hybridoma technique (Cole et al., Monoclonal Antibodies and Cancer Therapy, Alan R. Liss,1985, Inc., pp. 77-96) or trioma techniques. The technology for producing hybridomas is well known (see generally Current Protocols in Immunology (1994) Coligan et al., (eds.) John Wiley & Sons, Inc., New York, N.Y.). Briefly, an immortal cell line (typically a myeloma) is fused to lymphocytes (typically splenocytes) from a mammal immunized with an immunogen as described above, and the culture supernatants of the resulting hybridoma cells are screened to identify a hybridoma producing a monoclonal antibody that binds a polypeptide of the invention.

[0141] Any of the many well known protocols used for fusing lymphocytes and immortalized cell lines can be applied for the purpose of generating a monoclonal antibody to a polypeptide of the invention (see, e.g., Current Protocols in Immunology, supra; Galfre et al., Nature 266:55052 (1977); R. H. Kenneth, in Monoclonal Antibodies: A New Dimension In Biological Analyses, Plenum Publishing Corp., New York, N.Y. (1980); and Lerner, Yale J. Biol. Med. 54:387-402 (1981)). Moreover, the ordinarily skilled worker will appreciate that there are many variations of such methods that also would be useful.

[0142] Alternative to preparing monoclonal antibody-secreting hybridomas, a monoclonal antibody to a polypeptide of the invention can be identified and isolated by screening a recombinant combinatorial immunoglobulin library (e.g., an antibody phage display library) with the polypeptide to thereby isolate immunoglobulin library members that bind the polypeptide. Kits for generating and screening phage display libraries are commercially available (e.g., the Pharmacia Recombinant Phage Antibody System, Catalog NO: 27-9400-01; and the Stratagene SurfZAP™ Phage Display Kit, Catalog NO: 240612). Additionally, examples of methods and reagents particularly amenable for use in generating and screening antibody display library can be found in, for example, U.S. Pat. No.: 5,223,409; PCT Publication NO: WO 92/18619; PCT Publication NO: WO 91/17271; PCT Publication NO: WO 92/20791; PCT Publication NO: WO 92/15679; PCT Publication NO: WO 93/01288; PCT Publication NO: WO 92/01047; PCT Publication NO: WO 92/09690; PCT Publication NO: WO 90/02809; Fuchs et al., Bio/Technology 9: 1370-1372 (1991); Hay et al., Hum. Antibod. Hybridomas 3:81-85 (1992); Huse et al., Science 246: 1275-1281 (1989); and Griffiths et al., EMBO J. 12:725-734 (1993).

[0143] Additionally, recombinant antibodies, such as chimeric and humanized monoclonal antibodies, comprising both human and non-human portions, which can be made using standard recombinant DNA techniques, are within the scope of the invention. Such chimeric and humanized monoclonal antibodies can be produced by recombinant DNA techniques known in the art.

[0144] In general, antibodies of the invention (e.g., a monoclonal antibody) can be used to isolate a polypeptide of the invention by standard techniques, such as affinity chromatography or immunoprecipitation. A polypeptide-specific antibody can facilitate the purification of natural polypeptide from cells and of recombinantly produced polypeptide expressed in host cells. Moreover, an antibody specific for a polypeptide of the invention can be used to detect the polypeptide (e.g., in a cellular lysate, cell supernatant, or tissue sample) in order to evaluate the abundance and pattern of expression of the polypeptide. Antibodies can be used diagnostically to monitor protein levels in tissue as part of a clinical testing procedure, e.g., to, for example, determine the efficacy of a given treatment regimen. The antibody can be coupled to a detectable substance to facilitate its detection. Examples of detectable substances include various enzymes, prosthetic groups, fluorescent materials, luminescent materials, bioluminescent materials, and radioactive materials. Examples of suitable enzymes include horseradish peroxidase, alkaline phosphatase, beta-galactosidase, or acetylcholinesterase; examples of suitable prosthetic group complexes include streptavidinibiotin and avidin/biotin; examples of suitable fluorescent materials include umbelliferone, fluorescein, fluorescein isothiocyanate, rhodamine, dichlorotriazinylamine fluorescein, dansyl chloride or phycoerythrin; an example of a luminescent material includes luminol; examples of bioluminescent materials include luciferase, luciferin, and aequorin, and examples of suitable radioactive material include ¹²⁵I, ¹³¹I, ³⁵S or ³H.

Diagnostic Assays

[0145] The nucleic acids, probes, primers, polypeptides and antibodies described herein can be used in methods of diagnosis of Type II diabetes; of a susceptibility to Type II diabetes; or of a condition associated with a KChIP1 gene, as well as in kits (e.g., useful for diagnosis of Type II diabetes; a susceptibility to Type II diabetes; or a condition associated with a KChIP1 gene). In one embodiment, the kit comprises primers which contain one or more of the SNP's identified in Table 10.

[0146] In one embodiment of the invention, diagnosis of a disease or condition associated with a KChIP1 gene (e.g., diagnosis of Type II diabetes, or of a susceptibility to Type II diabetes) is made by detecting a polymorphism in a KChIP1 nucleic acid as described herein. The polymorphism can be a change in a KChIP1 nucleic acid, such as the insertion or deletion of a single nucleotide, or of more than one nucleotide, resulting in a frame shift; the change of at least one nucleotide, resulting in a change in the encoded amino acid; the change of at least one nucleotide, resulting in the generation of a premature stop codon; the deletion of several nucleotides, resulting in a deletion of one or more amino acids encoded by the nucleotides; the insertion of one or several nucleotides, such as by unequal recombination or gene conversion, resulting in an interruption of the coding sequence of the gene; duplication of all or a part of the gene; transposition of all or a part of the gene; or rearrangement of all or a part of the gene. More than one such change may be present in a single gene. Such sequence changes cause a difference in the polypeptide encoded by a KChIP1 nucleic acid. For example, if the difference is a frame shift change, the frame shift can result in a change in the encoded amino acids, and/or can result in the generation of a premature stop codon, causing generation of a truncated polypeptide. Alternatively, a polymorphism associated with a disease or condition or a susceptibility to a disease or condition associated with a KChIP1 nucleic acid can be a synonymous alteration in one or more nucleotides (i.e., an alteration that does not result in a change in the polypeptide encoded by a KChIP1 nucleic acid). Such a polymorphism may alter splicing sites, affect the stability or transport of mRNA, or otherwise affect the transcription or translation of the gene. A KChIP1 nucleic acid that has any of the changes or alterations described above is referred to herein as an “altered nucleic acid.”

[0147] In a first method of diagnosing Type II diabetes or a susceptibility to Type II diabetes, or another disease or condition associated with a KChIP1 gene, hybridization methods, such as Southern analysis, Northern analysis, or in situ hybridizations, can be used (see Current Protocols in Molecular Biology, Ausubel, F. et al., eds, John Wiley & Sons, including all supplements through 1999). For example, a biological sample (a “test sample”) from a test subject (the “test individual”) of genomic DNA, RNA, or cDNA, is obtained from an individual, such as an individual suspected of having, being susceptible to or predisposed for, or carrying a defect for, the disease or condition, or the susceptibility to the disease or condition, associated with a KChIP1 gene (e.g., Type II diabetes). The individual can be an adult, child, or fetus. The test sample can be from any source which contains genomic DNA, such as a blood sample, sample of amniotic fluid, sample of cerebrospinal fluid, or tissue sample from skin, muscle, buccal or conjunctival mucosa, placenta, gastrointestinal tract or other organs. A test sample of DNA from fetal cells or tissue can be obtained by appropriate methods, such as by amniocentesis or chorionic villus sampling. The DNA, RNA, or cDNA sample is then examined to determine whether a polymorphism in a KChIP1 nucleic acid is present, and/or to determine which splicing variant(s) encoded by the KChIP1 is present. The presence of the polymorphism or splicing variant(s) can be indicated by hybridization of the gene in the genomic DNA, RNA, or cDNA to a nucleic acid probe. A “nucleic acid probe”, as used herein, can be a DNA probe or an RNA probe; the nucleic acid probe can contain, for example, at least one polymorphism in a KChIP1 nucleic acid (e.g., as set forth in Table 10) and/or contain a nucleic acid encoding a particular splicing variant of a KChIP1 nucleic acid. The probe can be any of the nucleic acid molecules described above (e.g., the gene or nucleic acid, a fragment, a vector comprising the gene or nucleic acid, a probe or primer, etc.).

[0148] To diagnose Type II diabetes, or a susceptibility to Type II diabetes, or another condition associated with a KChIP1 gene, a hybridization sample is formed by contacting the test sample containing a KChIP1 nucleic acid with at least one nucleic acid probe. A preferred probe for detecting MRNA or genomic DNA is a labeled nucleic acid probe capable of hybridizing to mRNA or genomic DNA sequences described herein. The nucleic acid probe can be, for example, a full-length nucleic acid molecule, or a portion thereof, such as an oligonucleotide of at least 15, 30, 50, 100, 250 or 500 nucleotides in length and sufficient to specifically hybridize under stringent conditions to appropriate mRNA or genomic DNA. For example, the nucleic acid probe can be all or a portion of one of SEQ ID NOs: 114-258 or the complement thereof, or a portion thereof. Other suitable probes for use in the diagnostic assays of the invention are described above (see e.g., probes and primers discussed under the heading, “Nucleic Acids of the Invention”).

[0149] The hybridization sample is maintained under conditions that are sufficient to allow specific hybridization of the nucleic acid probe to a KChIP1 nucleic acid. “Specific hybridization”, as used herein, indicates exact hybridization (e.g., with no mismatches). Specific hybridization can be performed under high stringency conditions or moderate stringency conditions, for example, as described above. In a particularly preferred embodiment, the hybridization conditions for specific hybridization are high stringency.

[0150] Specific hybridization, if present, is then detected using standard methods. If specific hybridization occurs between the nucleic acid probe and KChIP1 nucleic acid in the test sample, then the KChIP1 has the polymorphism, or is the splicing variant, that is present in the nucleic acid probe. More than one nucleic acid probe can also be used concurrently in this method. Specific hybridization of any one of the nucleic acid probes is indicative of a polymorphism in the KChIP1 nucleic acid, or of the presence of a particular splicing variant encoding the KChIP1 nucleic acid and is therefore diagnostic for a susceptibility to a disease or condition associated with a KChIP1 nucleic acid (e.g., Type II diabetes).

[0151] In Northern analysis (see Current Protocols in Molecular Biology, Ausubel, F. et al., eds., John Wiley & Sons, supra) the hybridization methods described above are used to identify the presence of a polymorphism or a particular splicing variant, associated with a susceptibility to a disease or condition associated with a KChIP1 gene (e.g., Type II diabetes). For Northern analysis, a test sample of RNA is obtained from the individual by appropriate means. Specific hybridization of a nucleic acid probe, as described above, to RNA from the individual is indicative of a polymorphism in a KChIP1 nucleic acid, or of the presence of a particular splicing variant encoded by a KChIP1 nucleic acid and is therefore diagnostic for Type II diabetes or a susceptibility to Type II diabetes or a condition associated with a KChIP1 nucleic acid (e.g., Type II diabetes).

[0152] For representative examples of use of nucleic acid probes, see, for example, U.S. Pat. Nos.: 5,288,611 and 4,851,330.

[0153] Alternatively, a peptide nucleic acid (PNA) probe can be used instead of a nucleic acid probe in the hybridization methods described above. PNA is a DNA mimic having a peptide-like, inorganic backbone, such as N-(2-aminoethyl)glycine units, with an organic base (A, G, C, T or U) attached to the glycine nitrogen via a methylene carbonyl linker (see, for example, Nielsen, P. E. et al., Bioconjugate Chemistry 5, American Chemical Society, p. 1 (1994). The PNA probe can be designed to specifically hybridize to a gene having a polymorphism associated with a susceptibility to a disease or condition associated with a KChIP1 nucleic acid (e.g., Type II diabetes). Hybridization of the PNA probe to a KChIP1 gene is diagnostic for Type II diabetes or a susceptibility to Type II diabetes or a condition associated with a KChIP1 nucleic acid.

[0154] In another method of the invention, alteration analysis by restriction digestion can be used to detect an altered gene, or genes containing a polymorphism(s), if the alteration (mutation) or polymorphism in the gene results in the creation or elimination of a restriction site. A test sample containing genomic DNA is obtained from the individual. Polymerase chain reaction (PCR) can be used to amplify a KChIP1 nucleic acid (and, if necessary, the flanking sequences) in the test sample of genomic DNA from the test individual. RFLP analysis is conducted as described (see Current Protocols in Molecular Biology, supra). The digestion pattern of the relevant DNA fragment indicates the presence or absence of the alteration or polymorphism in the KChIP1 nucleic acid, and therefore indicates the presence or absence of Type II diabetes or the susceptibility to a disease or condition associated with a KChIP1 nucleic acid.

[0155] Sequence analysis can also be used to detect specific polymorphisms in a KChIP1 nucleic acid. A test sample of DNA or RNA is obtained from the test individual. PCR or other appropriate methods can be used to amplify the gene or nucleic acid, and/or its flanking sequences, if desired. The sequence of a KChIP1 nucleic acid, or a fragment of the nucleic acid, or cDNA, or fragment of the cDNA, or mRNA, or fragment of the MRNA, is determined, using standard methods. The sequence of the nucleic acid, nucleic acid fragment, cDNA, cDNA fragment, mRNA, or MRNA fragment is compared with the known nucleic acid sequence of the gene or cDNA (e.g., one or more of SEQ ID NOs:, 114-258 or a complement thereof ) or mRNA, as appropriate. The presence of a polymorphism in the KChIP1 indicates that the individual has Type II diabetes or a susceptibility to Type II diabetes.

[0156] Allele-specific oligonucleotides can also be used to detect the presence of a polymorphism in a KChIP1 nucleic acid, through the use of dot-blot hybridization of amplified oligonucleotides with allele-specific oligonucleotide (ASO) probes (see, for example, Saiki, R. et al., Nature 324:163-166 (1986)). An “allele-specific oligonucleotide” (also referred to herein as an “allele-specific oligonucleotide probe”) is an oligonucleotide of approximately 10-50 base pairs, preferably approximately 15-30 base pairs, that specifically hybridizes to a KChIP1 nucleic acid, and that contains a polymorphism associated with a susceptibility to a disease or condition associated with a KChIP1 nucleic acid. An allele-specific oligonucleotide probe that is specific for particular polymorphisms in a KChIP1 nucleic acid can be prepared, using standard methods (see Current Protocols in Molecular Biology, supra). To identify polymorphisms in the gene that are associated with a disease or condition associated with a KChIP1 nucleic acid or a susceptibility to a disease or condition associated with a KChIP1 nucleic acid a test sample of DNA is obtained from the individual. PCR can be used to amplify all or a fragment of a KChIP1 nucleic acid and its flanking sequences. The DNA containing the amplified KChIP1 nucleic acid (or fragment of the gene or nucleic acid) is dot-blotted, using standard methods (see Current Protocols in Molecular Biology, supra), and the blot is contacted with the oligonucleotide probe. The presence of specific hybridization of the probe to the amplified KChIP1 nucleic acid is then detected. Hybridization of an allele-specific oligonucleotide probe to DNA from the individual is indicative of a polymorphism in the KChIP1 nucleic acid, and is therefore indicative of a disease or condition associated with a KChIP1 nucleic acid or susceptibility to a disease or condition associated with a KChIP1 nucleic acid (e.g., Type II diabetes).

[0157] The invention further provides allele-specific oligonucleotides that hybridize to the reference or variant allele of a gene or nucleic acid comprising a single nucleotide polymorphism or to the complement thereof. These oligonucleotides can be probes or primers.

[0158] An allele-specific primer hybridizes to a site on target DNA overlapping a polymorphism and only primes amplification of an allelic form to which the primer exhibits perfect complementarity. See Gibbs, Nucleic Acid Res. 17, 2427-2448 (1989). This primer is used in conjunction with a second primer, which hybridizes at a distal site. Amplification proceeds from the two primers, resulting in a detectable product, which indicates the particular allelic form is present. A control is usually performed with a second pair of primers, one of which shows a single base mismatch at the polymorphic site and the other of which exhibits perfect complementarity to a distal site. The single-base mismatch prevents amplification and no detectable product is formed. The method works best when the mismatch is included in the 3′-most position of the oligonucleotide aligned with the polymorphism because this position is most destabilizing to elongation from the primer (see, e.g., WO 93/22456).

[0159] With the addition of such analogs as locked nucleic acids (LNAs), the size of primers and probes can be reduced to as few as 8 bases. LNAs are a novel class of bicyclic DNA analogs in which the 2′ and 4′ positions in the furanose ring are joined via an O-methylene (oxy-LNA), S-methylene (thio-LNA), or amino methylene (amino-LNA) moiety. Common to all of these LNA variants is an affinity toward complementary nucleic acids, which is by far the highest reported for a DNA analog. For example, particular all oxy-LNA nonamers have been shown to have melting temperatures of 64° C. and 74° C. when in complex with complementary DNA or RNA, respectively, as oposed to 28° C. for both DNA and RNA for the corresponding DNA nonamer. Substantial increases in Tₘ are also obtained when LNA monomers are used in combination with standard DNA or RNA monomers. For primers and probes, depending on where the LNA monomers are included (e.g., the 3′ end, the 5′ end, or in the middle), the Tm could be increased considerably.

[0160] In another embodiment, arrays of oligonucleotide probes that are complementary to target nucleic acid sequence segments from an individual, can be used to identify polymorphisms in a KChIP1 nucleic acid. For example, in one embodiment, an oligonucleotide array can be used. Oligonucleotide arrays typically comprise a plurality of different oligonucleotide probes that are coupled to a surface of a substrate in different known locations. These oligonucleotide arrays, also described as “Genechips™,” have been generally described in the art, for example, U.S. Pat. No.: 5,143,854 and PCT patent publication Nos. WO 90/15070 and 92/10092. These arrays can generally be produced using mechanical synthesis methods or light directed synthesis methods that incorporate a combination of photolithographic methods and solid phase oligonucleotide synthesis methods. See Fodor et al., Science 251:767-777 (1991), Pirrung et al., U.S. Pat. No.: 5,143,854 (see also PCT Application NO: WO 90/15070) and Fodor et al., PCT Publication NO: WO 92/10092 and U.S. Pat. No.: 5,424,186, the entire teachings of each of which are incorporated by reference herein. Techniques for the synthesis of these arrays using mechanical synthesis methods are described in, e.g., U.S. Pat. No.: 5,384,261; the entire teachings of which are incorporated by reference herein. In another example, linear arrays can be utilized.

[0161] Once an oligonucleotide array is prepared, a nucleic acid of interest is hybridized with the array and scanned for polymorphisms. Hybridization and scanning are generally carried out by methods described herein and also in, e.g., published PCT Application Nos. WO 92/10092 and WO 95/11995, and U.S. Pat. No.: 5,424,186, the entire teachings of which are incorporated by reference herein. In brief, a target nucleic acid sequence that includes one or more previously identified polymorphic markers is amplified by well-known amplification techniques, e.g., PCR. Typically, this involves the use of primer sequences that are complementary to the two strands of the target sequence both upstream and downstream from the polymorphism. Asymmetric PCR techniques may also be used. Amplified target, generally incorporating a label, is then hybridized with the array under appropriate conditions. Upon completion of hybridization and washing of the array, the array is scanned to determine the position on the array to which the target sequence hybridizes. The hybridization data obtained from the scan is typically in the form of fluorescence intensities as a function of location on the array.

[0162] Although primarily described in terms of a single detection block, e.g., for detection of a single polymorphism, arrays can include multiple detection blocks, and thus be capable of analyzing multiple, specific polymorphisms. In alternative arrangements, it will generally be understood that detection blocks may be grouped within a single array or in multiple, separate arrays so that varying, optimal conditions may be used during the hybridization of the target to the array. For example, it may often be desirable to provide for the detection of those polymorphisms that fall within G-C rich stretches of a genomic sequence, separately from those falling in A-T rich segments. This allows for the separate optimization of hybridization conditions for each situation.

[0163] Additional uses of oligonucleotide arrays for polymorphism detection can be found, for example, in U.S. Pat. Nos. 5,858,659 and 5,837,832, the entire teachings of which are incorporated by reference herein. Other methods of nucleic acid analysis can be used to detect polymorphisms in a Type II diabetes gene or variants encoding by a Type II diabetes gene. Representative methods include direct manual sequencing (Church and Gilbert, Proc. Natl. Acad. Sci. USA 81:1991-1995 (1988); Sanger, F. et al., Proc. Natl. Acad. Sci. USA 74:5463-5467 (1977); Beavis et al., U.S. Pat. No.: 5,288,644); automated fluorescent sequencing; single-stranded conformation polymorphism assays (SSCP); clamped denaturing gel electrophoresis (CDGE); denaturing gradient gel electrophoresis (DGGE) (Sheffield, V. C. et al., Proc. Natl. Acad. Sci. USA 86:232-236 (1989)), mobility shift analysis (Orita, M. et al., Proc. Natl. Acad. Sci. USA 86:2766-2770 (1989)), restriction enzyme analysis (Flavell et al., Cell 15:25 (1978); Geever, et al., Proc. Natl. Acad. Sci. USA 78:5081 (1981)); heteroduplex analysis; chemical mismatch cleavage (CMC) (Cotton et al., Proc. Natl. Acad. Sci. USA 85:4397-4401 (1985)); RNase protection assays (Myers, R. M. et al., Science 230:1242 (1985)); use of polypeptides which recognize nucleotide mismatches, such as E. coli mutS protein; allele-specific PCR, for example.

[0164] In one embodiment of the invention, diagnosis of a disease or condition associated with a KChIP1 nucleic acid (e.g., Type II diabetes) or a susceptibility to a disease or condition associated with a KChIP1 nucleic acid (e.g., Type II diabetes) can also be made by expression analysis by quantitative PCR (kinetic thermal cycling). This technique, utilizing TaqMan®, can be used to allow the identification of polymorphisms and whether a patient is homozygous or heterozygous. The technique can assess the presence of an alteration in the expression or composition of the polypeptide encoded by a KChIP1 nucleic acid or splicing variants encoded by a KChIP1 nucleic acid. Further, the expression of the variants can be quantified as physically or functionally different.

[0165] In another embodiment of the invention, diagnosis of Type II diabetes or a susceptibility to Type II diabetes 9 or a condition associated with a KChIP1 gene) can be made by examining expression and/or composition of a KChIP1 polypeptide, by a variety of methods, including enzyme linked immunosorbent assays (ELISAs), Western blots, immunoprecipitations and immunofluorescence. A test sample from an individual is assessed for the presence of an alteration in the expression and/or an alteration in composition of the polypeptide encoded by a KChIP1 nucleic acid, or for the presence of a particular variant encoded by a KChIP1 nucleic acid. An alteration in expression of a polypeptide encoded by a KChIP1 nucleic acid can be, for example, an alteration in the quantitative polypeptide expression (i.e., the amount of polypeptide produced); an alteration in the composition of a polypeptide encoded by a KChIP1 nucleic acid is an alteration in the qualitative polypeptide expression (e.g., expression of an altered KChIP1 polypeptide or of a different splicing variant). In a preferred embodiment, diagnosis of the disease or condition associated with KChIP1 nucleic acid or a susceptibility to a disease or condition associated with a KChIP1 nucleic acid is made by detecting a particular splicing variant encoded by that KChIP1 nucleic acid, or a particular pattern of splicing variants.

[0166] Both such alterations (quantitative and qualitative) can also be present. The term “alteration” in the polypeptide expression or composition, as used herein, refers to an alteration in expression or composition in a test sample, as compared with the expression or composition of polypeptide by a KChIP1 nucleic acid in a control sample. A control sample is a sample that corresponds to the test sample (e.g., is from the same type of cells), and is from an individual who is not affected by a susceptibility to a disease or condition associated with a KChIP1 nucleic acid. An alteration in the expression or composition of the polypeptide in the test sample, as compared with the control sample, is indicative of a susceptibility to a disease or condition associated with a KChIP1 nucleic acid. Similarly, the presence of one or more different splicing variants in the test sample, or the presence of significantly different amounts of different splicing variants in the test sample, as compared with the control sample, is indicative of a disease or condition associated with a KChIP1 nucleic acid or a susceptibility to a disease or condition associated with a KChIP1 nucleic acid. Various means of examining expression or composition of the polypeptide encoded by a KChIP1 nucleic acid can be used, including: spectroscopy, colorimetry, lectrophoresis, isoelectric focusing, and immunoassays (e.g., David et al., U.S. Pat. No. 4,376,110) such as immunoblotting (see also Current Protocols in Molecular Biology, particularly Chapter 10). For example, in one embodiment, an antibody capable of binding to the polypeptide (e.g., as described above), preferably an antibody with a detectable label, can be used. Antibodies can be polyclonal, or more preferably, monoclonal. An intact antibody, or a fragment thereof (e.g., Fab or F(ab′)₂) can be used. The term “labeled”, with regard to the probe or antibody, is intended to encompass direct labeling of the probe or antibody by coupling (ie., physically linking) a detectable substance to the probe or antibody, as well as indirect labeling of the probe or antibody by reactivity with another reagent that is directly labeled. Examples of indirect labeling include detection of a primary antibody using a fluorescently labeled secondary antibody and end-labeling of a DNA probe with biotin such that it can be detected with fluorescently labeled streptavidin.

[0167] Western blotting analysis, using an antibody as described above that specifically binds to a polypeptide encoded by an altered KChIP nucleic acid (e.g., a KChIP1 nucleic acid having one or more alterations as shown in Table 10), or an antibody that specifically binds to a polypeptide encoded by a non-altered nucleic acid, or an antibody that specifically binds to a particular splicing variant encoded by a nucleic acid, can be used to identify the presence in a test sample of a particular splicing variant or of a polypeptide encoded by a polymorphic or altered KChIP1 nucleic acid, or the absence in a test sample of a particular splicing variant or of a polypeptide encoded by a non-polymorphic or non-altered nucleic acid. The presence of a polypeptide encoded by a polymorphic or altered nucleic acid, or the absence of a polypeptide encoded by a non-polymorphic or non-altered nucleic acid, is diagnostic for a disease or condition associated with a KChIP1 nucleic acid or a susceptibility to a disease or condition associated with a KChIP1 nucleic acid (e.g., Type II diabetes), as is the presence (or absence) of particular splicing variants encoded by the KChIP1 nucleic acid.

[0168] In one embodiment of this method, the level or amount of polypeptide encoded by a KChIP1 nucleic acid in a test sample is compared with the level or amount of the polypeptide encoded by the KChIP1 in a control sample. A level or amount of the polypeptide in the test sample that is higher or lower than the level or amount of the polypeptide in the control sample, such that the difference is statistically significant, is indicative of an alteration in the expression of the polypeptide encoded by the KChIP1 nucleic acid, and is diagnostic for a disease or condition associated with a KChIP1 nucleic acid or a susceptibility to a disease or condition associated with that KChIP1 nucleic acid (e.g., Type II diabetes). Alternatively, the composition of the polypeptide encoded by a KChIP1 nucleic acid in a test sample is compared with the composition of the polypeptide encoded by the KChIP1 nucleic acid in a control sample (e.g., the presence of different splicing variants). A difference in the composition of the polypeptide in the test sample, as compared with the composition of the polypeptide in the control sample, is diagnostic for a disease or condition associated with a KChIP1 nucleic acid or a susceptibility to a disease or condition associated with that KChIP1 nucleic acid (e.g., Type II diabetes). In another embodiment, both the level or amount and the composition of the polypeptide can be assessed in the test sample and in the control sample. A difference in the amount or level of the polypeptide in the test sample, compared to the control sample; a difference in composition in the test sample, compared to the control sample; or both a difference in the amount or level, and a difference in the composition, is indicative of a disease or condition associated with a KChIP1 nucleic acid or a susceptibility to a disease or condition associated with that KChIP1 nucleic acid.

[0169] The invention further pertains to a method for the diagnosis or identification of a susceptibility to Type II diabetes in an individual, by identifying an at-risk haplotype (e.g., a haplotype comprising a KChIP1 nucleic acid). The KChIP1-associated haplotypes, e.g., those described in Table 2, Table 4, Table 5 and Table 14, describe a set of genetic markers (“alleles”). In a certain embodiment, the haplotype can comprise one or more alleles, two or more alleles, three or more alleles, four or more alleles, or five or more alleles. The genetic markers are particular “alleles” at “polymorphic sites” associated with KChIP1. A nucleotide position at which more than one sequence is possible in a population (either a natural population or a synthetic population, e.g., a library of synthetic molecules), is referred to herein as a “polymorphic site”. Where a polymorphic site is a single nucleotide in length, the site is referred to as a single nucleotide polymorphism (“SNP”). For example, if at a particular chromosomal location, one member of a population has an adenine and another member of the population has a thymine at the same position, then this position is a polymorphic site, and, more specifically, the polymorphic site is a SNP. Polymorphic sites can allow for differences in sequences based on substitutions, insertions or deletions. Each version of the sequence with respect to the polymorphic site is referred to herein as an “allele” of the polymorphic site. Thus, in the previous example, the SNP allows for both an adenine allele and a thymine allele.

[0170] Typically, a reference sequence is referred to for a particular sequence. Alleles that differ from the reference are referred to as “variant” alleles. For example, the reference KChIP1 sequence is described herein by SEQ ID NO: 1. The term, “variant KChIP1”, as used herein, refers to a sequence that differs from SEQ ID NO: 1, but is otherwise substantially similar. The genetic markers that make up the haplotypes described herein are KChIP1 variants. The variants of KChIP1 that are used to determine the haplotypes disclosed herein of the present invention are associated with Type II diabetes or a susceptibility to Type II diabetes.

[0171] Additional variants can include changes that affect a polypeptide, e.g., the KChIP1 polypeptide. These sequence differences, when compared to a reference nucleotide sequence, can include the insertion or deletion of a single nucleotide, or of more than one nucleotide, resulting in a frame shift; the change of at least one nucleotide, resulting in a change in the encoded amino acid; the change of at least one nucleotide, resulting in the generation of a premature stop codon; the deletion of several nucleotides, resulting in a deletion of one or more amino acids encoded by the nucleotides; the insertion of one or several nucleotides, such as by unequal recombination or gene conversion, resulting in an interruption of the coding sequence of a reading frame; duplication of all or a part of a sequence; transposition; or a rearrangement of a nucleotide sequence, as described in detail above. Such sequence changes alter the polypeptide encoded by a KChIP1 nucleic acid. For example, if the change in the nucleic acid sequence causes a frame shift, the frame shift can result in a change in the encoded amino acids, and/or can result in the generation of a premature stop codon, causing generation of a truncated polypeptide. Alternatively, a polymorphism associated with Type II diabetes or a susceptibility to Type II diabetes can be a synonymous change in one or more nucleotides (i.e., a change that does not result in a change in the amino acid sequence). Such a polymorphism can, for example, alter splice sites, affect the stability or transport of mRNA, or otherwise affect the transcription or translation of the polypeptide. The polypeptide encoded by the reference nucleotide sequence is the “reference” polypeptide with a particular reference amino acid sequence, and polypeptides encoded by variant alleles are referred to as “variant” polypeptides with variant amino acid sequences.

[0172] Haplotypes are a combination of genetic markers, e.g., particular alleles at polymorphic sites. The haplotypes described herein, e.g., having markers such as those shown in Table 10, Table 11, Table 12 or Table 13, are found more frequently in individuals with Type II diabetes than in individuals without Type II diabetes. Therefore, these haplotypes have predictive value for detecting Type II diabetes or a susceptibility to Type II diabetes in an individual. The haplotypes described herein are a combination of various genetic markers, e.g., SNPs and microsatellites. Therefore, detecting haplotypes can be accomplished by methods known in the art for detecting sequences at polymorphic sites, such as the methods described above.

Haplotype Screening

[0173] In the methods for the diagnosis and identification of susceptibility to Type II diabetes or Type II diabetes in an individual, an at-risk haplotype is identified. In one embodiment, the at-risk haplotype is one which confers a significant risk of Type II diabetes. In one embodiment, significance associated with a haplotype is measured by an odds ratio. In a further embodiment, the significance is measured by a percentage. In one embodiment, a significant risk is measured as an odds ratio of at least about 1.2, including by not limited to: 1.2, 1.3, 1.4, 1.5, 1.6, 1.7, 1.8, and 1.9. In a further embodiment, an odds ratio of at least 1.2 is significant. In a further embodiment, an odds ratio of at least about 1.5 is significant. In a further embodiment, a significant increase in risk is at least about 1.7 is significant. In a further embodiment, a significant increase in risk is at least about 20%, including but not limited to about 25%, 30%, 35%, 40%, 45%, 50%, 55%, 60%, 65%, 70%, 75%, 80%, 85%, 90%, 95% and 98%. In a further embodiment, a significant increase in risk is at least about 50%. It is understood however, that identifying whether a risk is medically significant may also depend on a variety of factors, including the specific disease, the haplotype, and often, environmental factors.

[0174] The invention also pertains to methods of diagnosing Type II diabetes or a susceptibility to Type II diabetes in an individual, comprising screening for an at-risk haplotype in, or comprising portions of, the KChIP1 gene, where the haplotype is more frequently present in an individual susceptible to Type II diabetes (affected), compared to the frequency of its presence in a healthy individual (control), and wherein the presence of the haplotype is indicative of Type II diabetes or susceptibility to Type II diabetes. Standard techniques for genotyping for the presence of SNPs and/or microsatellite markers can be used, such as fluorescent based techniques (Chen, et al., Genome Res. 9, 492 (1999)), PCR, LCR, Nested PCR and other techniques for nucleic acid amplification. In a preferred embodiment, the method comprises assessing in an individual the presence or frequency of SNPs and/or microsatellites in, comprising portions of, the KChIP1 gene, wherein an excess or higher frequency of the SNPs and/or microsatellites compared to a healthy control individual is indicative that the individual has Type II diabetes or is susceptible to Type II diabetes. See, for example, Tables 6, 7, 9, 11, 13 and 14 (below) for SNPs and markers that can form haplotypes that can be used as screening tools. These markers and SNPs can be used to design diagnostic tests for determining Type II diabetes or a susceptibility to Type II diabetes. For example, an at-risk haplotype can include microsatellite markers and/or SNPs such as those set forth in Table 10, Table 11, Table 12 Table 13 and/ or Table 14. The presence of the haplotype is diagnostic of Type II diabetes or of a susceptibility to Type II diabetes. Haplotype analysis involves defining a candidate susceptibility locus using LOD scores. The defined regions are then ultra-fine mapped with microsatellite markers with an average spacing between markers of less than 100 kb. All usable microsatellite markers that found in public databases and mapped within that region can be used. In addition, microsatellite markers identified within the deCODE genetics sequence assembly of the human genome can be used.

[0175] The frequencies of haplotypes in the patient and the control groups using an expectation-maximization algorithm can be estimated (Dempster A. et al., 1977. J. R. Stat. Soc. B, 39:1-389). An implementation of this algorithm that can handle missing genotypes and uncertainty with the phase can be used. Under the null hypothesis, the patients and the controls are assumed to have identical frequencies. Using a likelihood approach, an alternative hypothesis where a candidate at-risk-haplotype, which can include the markers described herein, is allowed to have a higher frequency in patients than controls, while the ratios of the frequencies of other haplotypes are assumed to be the same in both groups is tested. Likelihoods are maximized separately under both hypotheses and a corresponding 1-df likelihood ratio statistics is used to evaluate the statistic significance.

[0176] To look for at-risk-haplotypes in the I -lod drop, for example, association of all possible combinations of genotyped markers is studied, provided those markers span a practical region. The combined patient and control groups can be randomly divided into two sets, equal in size to the original group of patients and controls. The haplotype analysis is then repeated and the most significant p-value registered is determined. This randomization scheme can be repeated, for example, over 100 times to construct an empirical distribution of p-values.

[0177] The at-risk haplotypes identified in Table 2 (haplotypes identified as A1, A2, A3, A4, A5, A6, B1, B2, B3, B4 and B5), Table 4 (haplotypes identified as D1 and D2), Table 5 (haplotypes identified as D2, D3, D4, D5 and D6) or Table 14 (haplotypes identified as Hap E and Hap E′) are associated with Type II diabetes or a susceptibility to Type II diabetes. In certain embodiments, a haplotype associated with Type II diabetes or a susceptibility to Type II diabetes comprises markers DG5S879, DG5S881, D5S2075, DG5S883 and DG5S38 at the 5q35 locus; or DG5S1058 and DG5S37 at the 5q35 locus; or DG5S1058, DG5S37 and DG5S101 at the 5q35 locus; or DG5S881, DG5S1058, D5S2075, DG5S883 and DG5S38 at the 5q35 locus; or DG5S879, DG5S1058 and DG5S37; or DG5S881, D5S2075, DG5S883 and DG5S38 at the 5q35 locus; DG5S953, DG5S955, DG5S13 and DG5S959 at the 5q35 locus; or DG5S888 and DG5S953 at the 5q35 locus; or DG5S953, DG5S955 and DG5S124 at the 5q35 locus; or DG5S888, DG5S44 and DG5S953 at the 5q35 locus; or DG5S953, DG5S955, DG5S13, DG5S123, and DG5S959 at the 5q35 locus. The presence of the haplotype is diagnostic of Type II diabetes or of a susceptibility to Type II diabetes. Also described herein is a haplotype associated with Type II diabetes or a susceptibility to Type II diabetes comprising markers DG5S13, KCP_{—}1152, and D5S625 at the 5q35 locus; the presence of the haplotype is diagnostic of Type II diabetes or of a susceptibility to Type II diabetes. In one particular embodiment, the presence of the—4, 1, 0 haplotype at DG5S13, KCP_{—}1152, and D5S625 is diagnostic of Type II diabetes or of a susceptibility to Type II diabetes. In another embodiment, a haplotype associated with Type II diabetes or a susceptibility to Type II diabetes in an individual, comprises markers DG5S124, KCP_{—}1152, KCP_{—}2649, KPC_{—}4976 and KPC-16152 at the 5q35 locus. In one particular embodiment, the presence of the 0, 1, 1, 3 and 0 haplotype at DG5S124, KCP_{—}1152, KCP_{—}2649, KPC_{—}4976 and KPC-16152 is diagnostic of Type II diabetes or of a susceptibility to Type II diabetes. In another embodiment, a haplotype associated with Type II diabetes or a susceptibility to Type II diabetes in an individual, comprises markers KCP_{—}173982, KCP_{—}15400, and KCP_{—}18069. In one particular embodiment, the presence of the 0, 1, 1 haplotype at KCP_{—}173982, KCP_{—}15400, and KCP_{—}18069 is diagnostic of Type II diabetes or of a susceptibility to Type II diabetes.

[0178] In additional embodiments, a haplotype associated with Type II diabetes or a susceptibility to Type II diabetes comprises markers DG5S124, KCP_{—}1152, KCP_{—}2649, KCP_{—}4976, and KCP_{—}16152 at the 5q35 locus, as well as one of the following 3 markers: KCP_{—}197678, KCP_{—}197775, and KCP_{—}202795 at the 5q35 locus; the presence of the haplotype is diagnostic of Type II diabetes or of a susceptibility to Type II diabetes. In particular embodiments, the presence of the 0, 3, 1, 1, 3, 0 haplotype at DG5S124, KCP_{—}197678, KCP_{—}1152, KCP_{—}2649, KCP_{—}4976, and KCP_{—}16152; the presence of the 0, 3, 1, 1, 3, 0 haplotype at DG5S124, KCP_{—}197775, KCP_{—}1 152, KCP_{—}2649, KCP_{—}4976, and KCP16152; or the presence of the 0, 1, 1, 1, 3, 0 haplotype at DG5S124, KCP_{—}202795, KCP_{—}1152, KCP_{—}2649, KCP_{—}4976, and KCP_{—}16152; is diagnostic of Type II diabetes or of a susceptibility to Type II diabetes.

[0179] In additional embodiments, a haplotype associated with Type II diabetes or a susceptibility to Type II diabetes comprises markers rs1032856, KCP_RS888934, KCP_{—}93545, KCP_{—}102882, 169234, KCP_{—}186048 and KCP_{—}16152, as well as markers rs1032856, KCP_RS888934, KCP_{—}93545, KCP_{—}102882,169234, KCP_{—}186048, KCP_{—}197775 and KCP_{—}16152 at the 5q35 locus; the presence of the haplotype is diagnostic of Type II diabetes or of a susceptibility to Type II diabetes. In particular embodiments, the presence of the G, G, T, C, G, G, A haplotype at rs1032856, KCP_RS888934, KCP_{—}93545, KCP_{—}102882, 169234, KCP_{—}186048 and KCP_{—}16152, or the presence of the G, G, T, C, G, G, C, A haplotype at rs1032856, KCP_RS888934, KCP_{—}93545, KCP_{—}102882, 169234, KCP_{—}186048, KCP_{—}197775 and KCP_{—}16152 is diagnostic of Type II diabetes or of a susceptibility to Type II diabetes.

[0180] Kits (e.g., reagent kits) useful in the methods of diagnosis comprise components useful in any of the methods described herein, including for example, hybridization probes or primers as described herein (e.g., labeled probes or primers), reagents for detection of labeled molecules, restriction enzymes (e.g., for RFLP analysis), allele-specific oligonucleotides, antibodies which bind to altered or to non-altered (native) KChIP1 polypeptide, means for amplification of nucleic acids comprising a KChIP1 nucleic acid, or means for analyzing the nucleic acid sequence of a KChIP1 nucleic acid or for analyzing the amino acid sequence of a KChIP1 polypeptide as described herein, etc. In one embodiment, the kit for diagnosing a Type II diabetes or a susceptibility to Type II diabetes can comprise primers for nucleic acid amplification of a region in the KChIP1 nucleic acid comprising an at-risk haplotype that is more frequently present in an individual having Type II diabetes or who is susceptible to Type II diabetes. The primers can be designed using portions of the nucleic acids flanking SNPs that are indicative of Type II diabetes. In a certain embodiment, the primers are designed to amplify regions of the KChIP1 gene associated with an at-risk haplotype for Type II diabetes, as shown in Table 10 and 13, or more particularly the haplotypes described in Tables 2, 4, 5 and 14.

Screening Assays and Agents Identified Thereby

[0181] The invention provides methods (also referred to herein as “screening assays”) for identifying the presence of a nucleotide that hybridizes to a nucleic acid of the invention, as well as for identifying the presence of a polypeptide encoded by a nucleic acid of the invention. In one embodiment, the presence (or absence) of a nucleic acid molecule of interest (e.g., a nucleic acid that has significant homology with a nucleic acid of the invention) in a sample can be assessed by contacting the sample with a nucleic acid comprising a nucleic acid of the invention (e.g., a nucleic acid having the sequence of one of SEQ ID NOs: 1, 114-258, or the complement thereof, or a nucleic acid encoding an amino acid having the sequence of one of SEQ ID NOs: 2, or a fragment or variant of such nucleic acids), under stringent conditions as described above, and then assessing the sample for the presence (or absence) of hybridization. In one embodiment, high stringency conditions are conditions appropriate for selective hybridization. In another embodiment, a sample containing the nucleic acid molecule of interest is contacted with a nucleic acid containing a contiguous nucleotide sequence (e.g., a primer or a probe as described above) that is at least partially complementary to a part of the nucleic acid molecule of interest (e.g., a KChIP1 nucleic acid), and the contacted sample is assessed for the presence or absence of hybridization. In another embodiment, the nucleic acid containing a contiguous nucleotide sequence is completely complementary to a part of the nucleic acid molecule of interest.

[0182] In any of these embodiments, all or a portion of the nucleic acid of interest can be subjected to amplification prior to performing the hybridization.

[0183] In another embodiment, the presence (or absence) of a polypeptide of interest, such as a polypeptide of the invention or a fragment or variant thereof, in a sample can be assessed by contacting the sample with an antibody that specifically hybridizes to the polypeptide of interest (e.g., an antibody such as those described above), and then assessing the sample for the presence (or absence) of binding of the antibody to the polypeptide of interest.

[0184] In another embodiment, the invention provides methods for identifying agents (e.g., fusion proteins, polypeptides, peptidomimetics, prodrugs, receptors, binding agents, antibodies, small molecules or other drugs, or ribozymes) which alter (e.g., increase or decrease) the activity of the polypeptides described herein, or which otherwise interact with the polypeptides herein. For example, such agents can be agents which bind to polypeptides described herein (e.g., KChIP1 binding agents); which have a stimulatory or inhibitory effect on, for example, activity of polypeptides of the invention; or which change (e.g., enhance or inhibit) the ability of the polypeptides of the invention to interact with KChIP1 binding agents (e.g., receptors or other binding agents); or which alter posttranslational processing of the KChIP1 polypeptide (e.g., agents that alter proteolytic processing to direct the polypeptide from where it is normally synthesized to another location in the cell, such as the cell surface; agents that alter proteolytic processing such that more polypeptide is released from the cell, etc.

[0185] In one embodiment, the invention provides assays for screening candidate or test agents that bind to or modulate the activity of polypeptides described herein (or biologically active portion(s) thereof), as well as agents identifiable by the assays. Test agents can be obtained using any of the numerous approaches in combinatorial library methods known in the art, including: biological libraries; spatially addressable parallel solid phase or solution phase libraries; synthetic library methods requiring deconvolution; the ‘one-bead one-compound’ library method; and synthetic library methods using affinity chromatography selection. The biological library approach is limited to polypeptide libraries, while the other four approaches are applicable to polypeptide, non-peptide oligomer or small molecule libraries of compounds (Lam, K. S., Anticancer Drug Des. 12:145 (1997)).

[0186] In one embodiment, to identify agents which alter the activity of a KChIP1 polypeptide, a cell, cell lysate, or solution containing or expressing a KChIP1 polypeptide, or another splicing variant encoded by a KChIP1 gene (such as comprising a SNP as shown in Table 10 and/or 3), or a fragment or derivative thereof (as described above), can be contacted with an agent to be tested; alternatively, the polypeptide can be contacted directly with the agent to be tested. The level (amount) of KChIP1 activity is assessed (e.g., the level (amount) of KChIP1 activity is measured, either directly or indirectly), and is compared with the level of activity in a control (i.e., the level of activity of the KChIP1 polypeptide or active fragment or derivative thereof in the absence of the agent to be tested). If the level of the activity in the presence of the agent differs, by an amount that is statistically significant, from the level of the activity in the absence of the agent, then the agent is an agent that alters the activity of a KChIP1 polypeptide. An increase in the level of KChIP1 activity relative to a control, indicates that the agent is an agent that enhances (is an agonist of) KChIP1 activity. Similarly, a decrease in the level of KChIP1 activity relative to a control, indicates that the agent is an agent that inhibits (is an antagonist of) KChIP1 activity. In another embodiment, the level of activity of a KChIP1 polypeptide or derivative or fragment thereof in the presence of the agent to be tested, is compared with a control level that has previously been established. A level of the activity in the presence of the agent that differs from the control level by an amount that is statistically significant indicates that the agent alters KChIP1 activity.

[0187] The present invention also relates to an assay for identifying agents which alter the expression of a KChIP1 nucleic acid (e.g., antisense nucleic acids, fusion proteins, polypeptides, peptidomimetics, prodrugs, receptors, binding agents, antibodies, small molecules or other drugs, or ribozymes) which alter (e.g., increase or decrease) expression (e.g., transcription or translation) of the gene or which otherwise interact with the nucleic acids described herein, as well as agents identifiable by the assays. For example, a solution containing a nucleic acid encoding a KChIP1 polypeptide (e.g., a KChIP1 gene or nucleic acid) can be contacted with an agent to be tested. The solution can comprise, for example, cells containing the nucleic acid or cell lysate containing the nucleic acid; alternatively, the solution can be another solution that comprises elements necessary for transcription/translation of the nucleic acid. Cells not suspended in solution can also be employed, if desired. The level and/or pattern of KChIP1 expression (e.g., the level and/or pattern of mRNA or of protein expressed, such as the level and/or pattern of different splicing variants) is assessed, and is compared with the level and/or pattern of expression in a control (i.e., the level and/or pattern of the KChIP1 expression in the absence of the agent to be tested). If the level and/or pattern in the presence of the agent differs, by an amount or in a manner that is statistically significant, from the level and/or pattern in the absence of the agent, then the agent is an agent that alters the expression of a Type II diabetes gene. Enhancement of KChIP1 expression indicates that the agent is an agonist of KChIP1 activity. Similarly, inhibition of KChIP1 expression indicates that the agent is an antagonist of KChIP1 activity. In another embodiment, the level and/or pattern of KChIP1 polypeptide(s) (e.g., different splicing variants) in the presence of the agent to be tested, is compared with a control level and/or pattern that have previously been established. A level and/or pattern in the presence of the agent that differs from the control level and/or pattern by an amount or in a manner that is statistically significant indicates that the agent alters KChIP1 expression.

[0188] In another embodiment of the invention, agents which alter the expression of a KChIP1 nucleic acid or which otherwise interact with the nucleic acids described herein, can be identified using a cell, cell lysate, or solution containing a nucleic acid encoding the promoter region of the KChIP1 gene or nucleic acid operably linked to a reporter gene. After contact with an agent to be tested, the level of expression of the reporter gene (e.g., the level of mRNA or of protein expressed) is assessed, and is compared with the level of expression in a control (i.e., the level of the expression of the reporter gene in the absence of the agent to be tested). If the level in the presence of the agent differs, by an amount or in a manner that is statistically significant, from the level in the absence of the agent, then the agent is an agent that alters the expression of the KChIP1, as indicated by its ability to alter expression of a gene that is operably linked to the KChIP1 gene promoter. Enhancement of the expression of the reporter indicates that the agent is an agonist of KChIP1 activity. Similarly, inhibition of the expression of the reporter indicates that the agent is an antagonist of KChIP1 activity. In another embodiment, the level of expression of the reporter in the presence of the agent to be tested is compared with a control level that has previously been established. A level in the presence of the agent that differs from the control level by an amount or in a manner that is statistically significant indicates that the agent alters expression.

[0189] Agents which alter the amounts of different splicing variants encoded by a KChIP1 nucleic acid (e.g., an agent which enhances activity of a first splicing variant, and which inhibits activity of a second splicing variant), as well as agents which are agonists of activity of a first splicing variant and antagonists of activity of a second splicing variant, can easily be identified using these methods described above.

[0190] In other embodiments of the invention, assays can be used to assess the impact of a test agent on the activity of a polypeptide in relation to a KChIP1 binding agent. For example, a cell that expresses a compound that interacts with a KChIP1 polypeptide (herein referred to as a “KChIP1 binding agent”, which can be a polypeptide or other molecule that interacts with a KChIP1 polypeptide, such as a receptor) is contacted with a KChIP1 in the presence of a test agent, and the ability of the test agent to alter the interaction between the KChIP1 and the KChIP1 binding agent is determined. Alternatively, a cell lysate or a solution containing the KChIP1 binding agent, can be used. An agent which binds to the KChIP1 or the KChIP1 binding agent can alter the interaction by interfering with, or enhancing the ability of the KChIP1 to bind to, associate with, or otherwise interact with the KChIP1 binding agent. Determining the ability of the test agent to bind to a KChIP1 nucleic acid or a KChIP1 binding agent can be accomplished, for example, by coupling the test agent with a radioisotope or enzymatic label such that binding of the test agent to the polypeptide can be determined by detecting the labeled with ¹²⁵I, ³⁵S, ¹⁴C or ³H, either directly or indirectly, and the radioisotope detected by direct counting of radioemmission or by scintillation counting. Alternatively, test agents can be enzymatically labeled with, for example, horseradish peroxidase, alkaline phosphatase, or luciferase, and the enzymatic label detected by determination of conversion of an appropriate substrate to product. It is also within the scope of this invention to determine the ability of a test agent to interact with the polypeptide without the labeling of any of the interactants. For example, a microphysiometer can be used to detect the interaction of a test agent with a KChIP1 polypeptide or a KChIP1 binding agent without the labeling of either the test agent, KChIP1 polypeptide, or the KChIP1 binding agent. McConnell, H. M. et al., Science 257:1906-1912 (1992). As used herein, a “microphysiometer” (e.g., Cytosensor™) is an analytical instrument that measures the rate at which a cell acidifies its environment using a light-addressable potentiometric sensor (LAPS). Changes in this acidification rate can be used as an indicator of the interaction between ligand and polypeptide.

[0191] Thus, these receptors can be used to screen for compounds that are agonists or antagonists, for use in treating a susceptibility to a disease or condition associated with a KChIP1 gene or nucleic acid, or for studying a susceptibility to a disease or condition associated with a KChIP1 (e.g., Type II diabetes). Drugs could be designed to regulate KChIP1 activation that in turn can be used to regulate signaling pathways and transcription events of genes downstream.

[0192] In another embodiment of the invention, assays can be used to identify polypeptides that interact with one or more KChIP1 polypeptides, as described herein. For example, a yeast two-hybrid system such as that described by Fields and Song (Fields, S. and Song, O., Nature 340:245-246 (1989)) can be used to identify polypeptides that interact with one or more KChIP1 polypeptides. In such a yeast two-hybrid system, vectors are constructed based on the flexibility of a transcription factor that has two functional domains (a DNA binding domain and a transcription activation domain). If the two domains are separated but fused to two different proteins that interact with one another, transcriptional activation can be achieved, and transcription of specific markers (e.g., nutritional markers such as His and Ade, or color markers such as lacZ) can be used to identify the presence of interaction and transcriptional activation. For example, in the methods of the invention, a first vector is used which includes a nucleic acid encoding a DNA binding domain and also a KChIP1 polypeptide, splicing variant, or fragment or derivative thereof, and a second vector is used which includes a nucleic acid encoding a transcription activation domain and also a nucleic acid encoding a polypeptide which potentially may interact with the KChIP1 polypeptide, splicing variant, or fragment or derivative thereof (e.g., a KChIP1 polypeptide binding agent or receptor). Incubation of yeast containing the first vector and the second vector under appropriate conditions (e.g., mating conditions such as used in the Matchmaker™ system from Clontech (Palo Alto, Calif., USA)) allows identification of colonies that express the markers of interest. These colonies can be examined to identify the polypeptide(s) that interact with the KChIP1 polypeptide or fragment or derivative thereof. Such polypeptides may be useful as agents that alter the activity of expression of a KChIP1 polypeptide, as described above.

[0193] In more than one embodiment of the above assay methods of the present invention, it may be desirable to immobilize either the KChIP1 gene or nucleic acid, the KChIP1 polypeptide, the KChIP1 binding agent, or other components of the assay on a solid support, in order to facilitate separation of complexed from uncomplexed forms of one or both of the polypeptides, as well as to accommodate automation of the assay. Binding of a test agent to the polypeptide, or interaction of the polypeptide with a binding agent in the presence and absence of a test agent, can be accomplished in any vessel suitable for containing the reactants. Examples of such vessels include microtitre plates, test tubes, and micro-centrifuge tubes. In one embodiment, a fusion protein (e.g., a glutathione-S-transferase fusion protein) can be provided which adds a domain that allows a KChIP1 nucleic acid, KChIP1 polypeptide, or a KChIP1 binding agent to be bound to a matrix or other solid support.

[0194] In another embodiment, modulators of expression of nucleic acid molecules of the invention are identified in a method wherein a cell, cell lysate, or solution containing a KChIP1 nucleic acid is contacted with a test agent and the expression of appropriate mRNA or polypeptide (e.g., splicing variant(s)) in the cell, cell lysate, or solution, is determined. The level of expression of appropriate mRNA or polypeptide(s) in the presence of the test agent is compared to the level of expression of MRNA or polypeptide(s) in the absence of the test agent. The test agent can then be identified as a modulator of expression based on this comparison. For example, when expression of mRNA or polypeptide is greater (statistically significantly greater) in the presence of the test agent than in its absence, the test agent is identified as a stimulator or enhancer of the mRNA or polypeptide expression. Alternatively, when expression of the mRNA or polypeptide is less (statistically significantly less) in the presence of the test agent than in its absence, the test agent is identified as an inhibitor of the MRNA or polypeptide expression. The level of mRNA or polypeptide expression in the cells can be determined by methods described herein for detecting mRNA or polypeptide.

[0195] This invention further pertains to novel agents identified by the above-described screening assays. Accordingly, it is within the scope of this invention to further use an agent identified as described herein in an appropriate animal model. For example, an agent identified as described herein (e.g., a test agent that is a modulating agent, an antisense nucleic acid molecule, a specific antibody, or a polypeptide-binding agent) can be used in an animal model to determine the efficacy, toxicity, or side effects of treatment with such an agent. Alternatively, an agent identified as described herein can be used in an animal model to determine the mechanism of action of such an agent.

[0196] Furthermore, this invention pertains to uses of novel agents identified by the above-described screening assays for treatments as described herein. In addition, an agent identified as described herein can be used to alter activity of a polypeptide encoded by a KChIP1 nucleic acid, or to alter expression of a KChIP1 nucleic acid, by contacting the polypeptide or the nucleic acid (or contacting a cell comprising the polypeptide or the nucleic acid) with the agent identified as described herein.

Pharmaceutical Compositions

[0197] The present invention also pertains to pharmaceutical compositions comprising nucleic acids described herein, particularly nucleotides encoding the polypeptides described herein (e.g., a KChIP1 polypeptide); comprising polypeptides described herein and/or comprising other splicing variants encoded by a KChIP1 nucleic acid; and/or an agent that alters (e.g., enhances or inhibits) KChIP1 nucleic acid expression or KChIP1 polypeptide activity as described herein. For instance, a polypeptide, protein (e.g., a KChIP1 nucleic acid receptor), an agent that alters KChIP1 nucleic acid expression, or a KChIP1 binding agent or binding partner, fragment, fusion protein or pro-drug thereof, or a nucleotide or nucleic acid construct (vector) comprising a nucleotide of the present invention, or an agent that alters KChIP1 polypeptide activity, can be formulated with a physiologically acceptable carrier or excipient to prepare a pharmaceutical composition. The carrier and composition can be sterile. The formulation should suit the mode of administration.

[0198] Suitable pharmaceutically acceptable carriers include but are not limited to water, salt solutions (e.g., NaCl), saline, buffered saline, alcohols, glycerol, ethanol, gum arabic, vegetable oils, benzyl alcohols, polyethylene glycols, gelatin, carbohydrates such as lactose, amylose or starch, dextrose, magnesium stearate, talc, silicic acid, viscous paraffin, perfume oil, fatty acid esters, hydroxymethylcellulose, polyvinyl pyrolidone, etc., as well as combinations thereof. The pharmaceutical preparations can, if desired, be mixed with auxiliary agents, e.g., lubricants, preservatives, stabilizers, wetting agents, emulsifiers, salts for influencing osmotic pressure, buffers, coloring, flavoring and/or aromatic substances and the like which do not deleteriously react with the active agents.

[0199] The composition, if desired, can also contain minor amounts of wetting or emulsifying agents, or pH buffering agents. The composition can be a liquid solution, suspension, emulsion, tablet, pill, capsule, sustained release formulation, or powder. The composition can be formulated as a suppository, with traditional binders and carriers such as triglycerides. Oral formulation can include standard carriers such as pharmaceutical grades of mannitol, lactose, starch, magnesium stearate, polyvinyl pyrollidone, sodium saccharine, cellulose, magnesium carbonate, etc.

[0200] Methods of introduction of these compositions include, but are not limited to, intradermal, intramuscular, intraperitoneal, intraocular, intravenous, subcutaneous, topical, oral and intranasal. Other suitable methods of introduction can also include gene therapy (as described below), rechargeable or biodegradable devices, particle acceleration devises (“gene guns”) and slow release polymeric devices. The pharmaceutical compositions of this invention can also be administered as part of a combinatorial therapy with other agents.

[0201] The composition can be formulated in accordance with the routine procedures as a pharmaceutical composition adapted for administration to human beings. For example, compositions for intravenous administration typically are solutions in sterile isotonic aqueous buffer. Where necessary, the composition may also include a solubilizing agent and a local anesthetic to ease pain at the site of the injection. Generally, the ingredients are supplied either separately or mixed together in unit dosage form, for example, as a dry lyophilized powder or water free concentrate in a hermetically sealed container such as an ampule or sachette indicating the quantity of active agent. Where the composition is to be administered by infusion, it can be dispensed with an infusion bottle containing sterile pharmaceutical grade water, saline or dextrose/water. Where the composition is administered by injection, an ampule of sterile water for injection or saline can be provided so that the ingredients may be mixed prior to administration.

[0202] For topical application, nonsprayable forms, viscous to semi-solid or solid forms comprising a carrier compatible with topical application and having a dynamic viscosity preferably greater than water, can be employed. Suitable formulations include but are not limited to solutions, suspensions, emulsions, creams, ointments, powders, enemas, lotions, sols, liniments, salves, aerosols, etc., which are, if desired, sterilized or mixed with auxiliary agents, e.g., preservatives, stabilizers, wetting agents, buffers or salts for influencing osmotic pressure, etc. The agent may be incorporated into a cosmetic formulation. For topical application, also suitable are sprayable aerosol preparations wherein the active ingredient, preferably in combination with a solid or liquid inert carrier material, is packaged in a squeeze bottle or in admixture with a pressurized volatile, normally gaseous propellant, e.g., pressurized air.

[0203] Agents described herein can be formulated as neutral or salt forms. Pharmaceutically acceptable salts include those formed with free amino groups such as those derived from hydrochloric, phosphoric, acetic, oxalic, tartaric acids, etc., and those formed with free carboxyl groups such as those derived from sodium, potassium, ammonium, calcium, ferric hydroxides, isopropylamine, triethylamine, 2-ethylamino ethanol, histidine, procaine, etc.

[0204] The agents are administered in a therapeutically effective amount. The amount of agents which will be therapeutically effective in the treatment of a particular disorder or condition will depend on the nature of the disorder or condition, and can be determined by standard clinical techniques. In addition, in vitro or in vivo assays may optionally be employed to help identify optimal dosage ranges. The precise dose to be employed in the formulation will also depend on the route of administration, and the seriousness of the symptoms, and should be decided according to the judgment of a practitioner and each patient's circumstances. Effective doses may be extrapolated from dose-response curves derived from in vitro or animal model test systems.

[0205] The invention also provides a pharmaceutical pack or kit comprising one or more containers filled with one or more of the ingredients of the pharmaceutical compositions of the invention. Optionally associated with such container(s) can be a notice in the form prescribed by a governmental agency regulating the manufacture, use or sale of pharmaceuticals or biological products, which notice reflects approval by the agency of manufacture, use of sale for human administration. The pack or kit can be labeled with information regarding mode of administration, sequence of drug administration (e.g., separately, sequentially or concurrently), or the like. The pack or kit may also include means for reminding the patient to take the therapy. The pack or kit can be a single unit dosage of the combination therapy or it can be a plurality of unit dosages. In particular, the agents can be separated, mixed together in any combination, present in a single vial or tablet. Agents assembled in a blister pack or other dispensing means is preferred. For the purpose of this invention, unit dosage is intended to mean a dosage that is dependent on the individual pharmacodynamics of each agent and administered in FDA approved dosages in standard time courses.

Methods of Therapy

[0206] The present invention also pertains to methods of treatment (prophylactic and/or therapeutic) for certain diseases and conditions associated with KChIP1. In particular, the invention relates to methods of treatment for Type II diabetes or a susceptibility to Type II diabetes, using a Type II diabetes therapeutic agent. A “Type II diabetes therapeutic agent” is an agent that alters (e.g., enhances or inhibits) KChIP1 polypeptide activity and/or KChIP1 nucleic acid expression, as described herein (e.g., a Type II diabetes nucleic acid agonist or antagonist). In certain embodiments, the Type II diabetes therapeutic agent alters activity and/or nucleic acid expression of KChIP1.

[0207] Type II diabetes therapeutic agents can alter KChIP1 polypeptide activity or nucleic acid expression by a variety of means, such as, for example, by providing additional KChIP1 polypeptide or by upregulating the transcription or translation of the KChIP1 nucleic acid; by altering posttranslational processing of the KChIP1 polypeptide; by altering transcription of KChIP1 splicing variants; or by interfering with KChIP1 polypeptide activity (e.g., by binding to a KChIP1 polypeptide), or by binding to another polypeptide that interacts with KChIP1, by altering (e.g., downregulating) the expression, transcription or translation of a KChIP1 nucleic acid, or by altering (e.g., agonizing or antagonizing) activity.

[0208] Representative Type II diabetes therapeutic agents include the following:
[0209] nucleic acids or fragments or derivatives thereof described herein, particularly nucleotides encoding the polypeptides described herein and vectors comprising such nucleic acids (e.g., a gene, cDNA, and/or mRNA, such as a nucleic acid encoding a KChIP1 polypeptide or active fragment or derivative thereof, or an oligonucleotide; or a complement thereof, or fragments or derivatives thereof, and/or other splicing variants encoded by a Type II diabetes nucleic acid, or fragments or derivatives thereof);
[0210] polypeptides described herein and/ or splicing variants encoded by the KChIP1 nucleic acid or fragments or derivatives thereof;
[0211] other polypeptides (e.g., KChIP1 receptors); KChIP1 binding agents; or agents that affect (e.g., increase or decrease) activity, antibodies, such as an antibody to an altered KChIP1 polypeptide, or an antibody to a non-altered KChIP1 polypeptide, or an antibody to a particular splicing variant encoded by a KChIP1 nucleic acid as described above;
[0212] peptidomimetics; fusion proteins or prodrugs thereof, ribozymes; other small molecules; and
[0213] other agents that alter (e.g., enhance or inhibit) expression of a KChIP1 nucleic acid, or that regulate transcription of KChIP splicing variants (e.g., agents that affect which splicing variants are expressed, or that affect the amount of each splicing variant that is expressed).
   More than one Type II diabetes therapeutic agent can be used concurrently, if desired.

[0214] A Type II diabetes nucleic acid therapeutic agent that is a nucleic acid is used in the treatment of Type II diabetes or in the treatment for a susceptibility to Type II diabetes. The term, “treatment” as used herein, refers not only to ameliorating symptoms associated with the disease or condition, but also preventing or delaying the onset of the disease or condition, and also lessening the severity or frequency of symptoms of the disease or condition. The therapy is designed to alter (e.g., inhibit or enhance), replace or supplement activity of a KChIP1 polypeptide in an individual. For example, a Type II diabetes therapeutic agent can be administered in order to upregulate or increase the expression or availability of the KChIP1 nucleic acid or of specific splicing variants of KChIP1 nucleic acid, or, conversely, to downregulate or decrease the expression or availability of the KChIP1 nucleic acid or specific splicing variants of the KChIP1 nucleic acid. Upregulation or increasing expression or availability of a native KChIP1 gene or nucleic acid or of a particular splicing variant could interfere with or compensate for the expression or activity of a defective gene or another splicing variant; downregulation or decreasing expression or availability of a native KChIP1 gene or of a particular splicing variant could minimize the expression or activity of a defective gene or the particular splicing variant and thereby minimize the impact of the defective gene or the particular splicing variant.

[0215] The Type II diabetes therapeutic agent(s) are administered in a therapeutically effective amount (i.e., an amount that is sufficient to treat the disease, such as by ameliorating symptoms associated with the disease, preventing or delaying the onset of the disease, and/or also lessening the severity or frequency of symptoms of the disease). The amount which will be therapeutically effective in the treatment of a particular individual's disorder or condition will depend on the symptoms and severity of the disease, and can be determined by standard clinical techniques. In addition, in vitro or in vivo assays may optionally be employed to help identify optimal dosage ranges. The precise dose to be employed in the formulation will also depend on the route of administration, and the seriousness of the disease or disorder, and should be decided according to the judgment of a practitioner and each patient's circumstances. Effective doses may be extrapolated from dose-response curves derived from in vitro or animal model test systems.

[0216] In one embodiment, a nucleic acid of the invention (e.g., a nucleic acid encoding a KChIP1 polypeptide, such as one of SEQ ID NO: 1 or a complement thereof); or another nucleic acid that encodes a KChIP1 polypeptide or a splicing variant, derivative or fragment thereof (e.g., comprising any one or more of SEQ ID NO: 114-258), can be used, either alone or in a pharmaceutical composition as described above. For example, a KChIP1 gene or nucleic acid or a cDNA encoding a KChIP1 polypeptide, either by itself or included within a vector, can be introduced into cells (either in vitro or in vivo) such that the cells produce native KChIP1 polypeptide. If necessary, cells that have been transformed with the gene or cDNA or a vector comprising the gene, nucleic acid or cDNA can be introduced (or re-introduced) into an individual affected with the disease. Thus, cells which, in nature, lack native KChIP1 expression and activity, or have altered KChIP1 expression and activity, or have expression of a disease-associated KChIP1 splicing variant, can be engineered to express the KChIP1 polypeptide or an active fragment of the KChIP1 polypeptide (or a different variant of the KChIP1 polypeptide). In certain embodiments, nucleic acids encoding a KChIP1 polypeptide, or an active fragment or derivative thereof, can be introduced into an expression vector, such as a viral vector, and the vector can be introduced into appropriate cells in an animal. Other gene transfer systems, including viral and nonviral transfer systems, can be used. Alternatively, nonviral gene transfer methods, such as calcium phosphate coprecipitation, mechanical techniques (e.g., microinjection); membrane fusion-mediated transfer via liposomes; or direct DNA uptake, can also be used.

[0217] Alternatively, in another embodiment of the invention, a nucleic acid of the invention; a nucleic acid complementary to a nucleic acid of the invention; or a portion of such a nucleic acid (e.g., an oligonucleotide as described below), can be used in “antisense” therapy, in which a nucleic acid (e.g., an oligonucleotide) which specifically hybridizes to the mRNA and/or genomic DNA of a Type II diabetes gene is administered or generated in situ. The antisense nucleic acid that specifically hybridizes to the MRNA and/or DNA inhibits expression of the KChIP1 polypeptide, e.g., by inhibiting translation and/or transcription. Binding of the antisense nucleic acid can be by conventional base pair complementarity, or, for example, in the case of binding to DNA duplexes, through specific interaction in the major groove of the double helix.

[0218] An antisense construct of the present invention can be delivered, for example, as an expression plasmid as described above. When the plasmid is transcribed in the cell, it produces RNA that is complementary to a portion of the mRNA and/or DNA which encodes the KChIP1 polypeptide. Alternatively, the antisense construct can be an oligonucleotide probe that is generated ex vivo and introduced into cells; it then inhibits expression by hybridizing with the mRNA and/or genomic DNA of the polypeptide. In one embodiment, the oligonucleotide probes are modified oligonucleotides, which are resistant to endogenous nucleases, e.g., exonucleases and/or endonucleases, thereby rendering them stable in vivo. Exemplary nucleic acid molecules for use as antisense oligonucleotides are phosphoramidate, phosphothioate and methylphosphonate analogs of DNA (see also U.S. Pat. Nos. 5,176,996; 5,264,564; and 5,256,775). Additionally, general approaches to constructing oligomers useful in antisense therapy are also described, for example, by Van der Krol et al., (BioTechniques 6:958-976 (1988)); and Stein et al., (Cancer Res. 48:2659-2668 (1988)). With respect to antisense DNA, oligodeoxyribonucleotides derived from the translation initiation site are preferred.

[0219] To perform antisense therapy, oligonucleotides (mRNA, cDNA or DNA) are designed that are complementary to mRNA encoding the KChIP1. The antisense oligonucleotides bind to KChIP1 mRNA transcripts and prevent translation. Absolute complementarity, although preferred, is not required. A sequence “complementary” to a portion of an RNA, as referred to herein, indicates that a sequence has sufficient complementarity to be able to hybridize with the RNA, forming a stable duplex; in the case of double-stranded antisense nucleic acids, a single strand of the duplex DNA may thus be tested, or triplex formation may be assayed. The ability to hybridize will depend on both the degree of complementarity and the length of the antisense nucleic acid, as described in detail above. Generally, the longer the hybridizing nucleic acid, the more base mismatches with an RNA it may contain and still form a stable duplex (or triplex, as the case may be). One skilled in the art can ascertain a tolerable degree of mismatch by use of standard procedures.

[0220] The oligonucleotides used in antisense therapy can be DNA, RNA, or chimeric mixtures or derivatives or modified versions thereof, single-stranded or double-stranded. The oligonucleotides can be modified at the base moiety, sugar moiety, or phosphate backbone, for example, to improve stability of the molecule, hybridization, etc. The oligonucleotides can include other appended groups such as peptides (e.g. for targeting host cell receptors in vivo), or agents facilitating transport across the cell membrane (see, e.g., Letsinger et al., Proc. Natl. Acad. Sci. USA 86:6553-6556 (1989); Lemaitre et al., Proc. Natl. Acad. Sci. USA 84:648-652 (1987); PCT International Publication NO: WO 88/09810) or the blood-brain barrier (see, e.g., PCT International Publication NO: WO 89/10134), or hybridization-triggered cleavage agents (see, e.g., Krol et al., BioTechniques 6:958-976 (1988)) or intercalating agents. (See, e.g., Zon, Pharm. Res. 5:539-549 (1988)). To this end, the oligonucleotide may be conjugated to another molecule (e.g., a peptide, hybridization triggered cross-linking agent, transport agent, hybridization-triggered cleavage agent).

[0221] The antisense molecules are delivered to cells that express KChIP1 in vivo. A number of methods can be used for delivering antisense DNA or RNA to cells; e.g., antisense molecules can be injected directly into the tissue site, or modified antisense molecules, designed to target the desired cells (e.g., antisense linked to peptides or antibodies that specifically bind receptors or antigens expressed on the target cell surface) can be administered systematically. Alternatively, in a preferred embodiment, a recombinant DNA construct is utilized in which the antisense oligonucleotide is placed under the control of a strong promoter (e.g., pol III or pol II). The use of such a construct to transfect target cells in the patient results in the transcription of sufficient amounts of single stranded RNAs that will form complementary base pairs with the endogenous KChIP1 transcripts and thereby prevent translation of the KChIP1 mRNA. For example, a vector can be introduced in vivo such that it is taken up by a cell and directs the transcription of an antisense RNA. Such a vector can remain episomal or become chromosomally integrated, as long as it can be transcribed to produce the desired antisense RNA. Such vectors can be constructed by recombinant DNA technology methods standard in the art and described above. For example, a plasmid, cosmid, YAC or viral vector can be used to prepare the recombinant DNA construct that can be introduced directly into the tissue site. Alternatively, viral vectors can be used which selectively infect the desired tissue, in which case administration may be accomplished by another route (e.g., systemically).

[0222] Endogenous KChIP1 polypeptide expression can also be reduced by inactivating or “knocking out” the gene, nucleic acid or its promoter using targeted homologous recombination (e.g., see Smithies et al., Nature 317:230-234 (1985); Thomas & Capecchi, Cell 51:503-512 (1987); Thompson et al., Cell 5:313-321 (1989)). For example, an altered, non-functional gene or nucleic acid (or a completely unrelated DNA sequence) flanked by DNA homologous to the endogenous gene or nucleic acid (either the coding regions or regulatory regions of the nucleic acid) can be used, with or without a selectable marker and/or a negative selectable marker, to transfect cells that express the gene or nucleic acid in vivo. Insertion of the DNA construct, via targeted homologous recombination, results in inactivation of the gene or nucleic acid. The recombinant DNA constructs can be directly administered or targeted to the required site in vivo using appropriate vectors, as described above. Alternatively, expression of non-altered genes or nucleic acids can be increased using a similar method: targeted homologous recombination can be used to insert a DNA construct comprising a non-altered functional gene or nucleic acid, e.g., a nucleic acid comprising one or more of SEQ ID NOs: 114-258 or the complement thereof, or a portion thereof, in place of an altered KChIP1 in the cell, as described above. In another embodiment, targeted homologous recombination can be used to insert a DNA construct comprising a nucleic acid that encodes a Type II diabetes polypeptide variant that differs from that present in the cell.

[0223] Alternatively, endogenous KChIP1 nucleic acid expression can be reduced by targeting deoxyribonucleotide sequences complementary to the regulatory region of a KChIP1 nucleic acid (i.e., the KChIP1 promoter and/or enhancers) to form triple helical structures that prevent transcription of the KChIP1 nucleic acid in target cells in the body. (See generally, Helene, C., Anticancer Drug Des., 6(6):569-84 (1991); Helene, C. et al., Ann. N.Y Acad. Sci. 660:27-36 (1992); and Maher, L. J., Bioassays 14(12):807-15 (1992)). Likewise, the antisense constructs described herein, by antagonizing the normal biological activity of one of the KChIP1 proteins, can be used in the manipulation of tissue, e.g., tissue differentiation, both in vivo and for ex vivo tissue cultures. Furthermore, the anti-sense techniques (e.g., microinjection of antisense molecules, or transfection with plasmids whose transcripts are anti-sense with regard to a Type II diabetes gene mRNA or gene sequence) can be used to investigate the role of KChIP1 or the interaction of KChIP1 and its binding agents in developmental events, as well as the normal cellular function of KChIP1 or of the interaction of KChIP1 and its binding agents in adult tissue. Such techniques can be utilized in cell culture, but can also be used in the creation of transgenic animals.

[0224] In yet another embodiment of the invention, other Type II diabetes therapeutic agents as described herein can also be used in the treatment or prevention of a susceptibility to a disease or condition associated with a Type II diabetes gene. The therapeutic agents can be delivered in a composition, as described above, or by themselves. They can be administered systemically, or can be targeted to a particular tissue. The therapeutic agents can be produced by a variety of means, including chemical synthesis; recombinant production; in vivo production (e.g., a transgenic animal, such as U.S. Pat. No.: 4,873,316 to Meade et al.), for example, and can be isolated using standard means such as those described herein.

[0225] A combination of any of the above methods of treatment (e.g., administration of non-altered polypeptide in conjunction with antisense therapy targeting altered mRNA of KChIP1; administration of a first splicing variant encoded by a KChIP1 nucleic acid in conjunction with antisense therapy targeting a second splicing encoded by a KChIP1 nucleic acid) can also be used.

[0226] The present invention is now illustrated by the following Exemplification, which is not intended to be limiting in any way. All references cited herein are incorporated by reference in their entirety.

Exemplification

[0227] The study was done in collaboration with the Icelandic Heart Association, who provided an encrypted list of 1350 diabetic patients. In 1967-1991 the Heart Association started a study of cardiovascular disease and its complications. Measurements of blood sugar were included in a thorough check-up of the participants which results led to many individuals being diagnosed with diabetes. The list of participants is an unbiased sample of about a third of the Icelandic nation. Individuals diagnosed in the years following 1991 were either diagnosed at the Icelandic Heart Association or at one of two major hospitals in Reykjavik, Iceland.

[0228] All participants in the Type II diabetes study visited the Icelandic Heart Association where each answered a questionnaire, had blood drawn, a blood sugar assessment, and measurements taken. Height (m) and weight (kg) were measured to calculate the body mass index. In serum, the fasting blood glucose and triglyceride levels were measured as well. Diagnoses of Type II diabetes were based on the diagnostic criteria set by the World Health Organization (1999). All patients with fasting glucose above 7 mM were diagnosed as having Type II diabetes and individuals with fasting blood sugar between 6.1-6.9 mM were diagnosed with impaired fasting glucose. If the participants had no prior history of diabetes, they were requested to come in for another test to have their diagnosis confirmed. All individuals on diabetic medication were classified as Type II. The questionnaire included questions regarding age at diagnosis and type of medication. All patients were requested to bring two relatives who's DNA was used to confirm the genetotypes of the patients.

[0229] Since the patients had participated in a study that was conducted between 1967-1991 a considerable time had passed, in some instances, since they had visited the Heart Association. Therefore, all the patients were required to have another fasting blood glucose test to check on their blood sugar level at the time of participation in the study. Thus, all patients were labeled unconfirmed, meaning that results of blood glucose levels were pending, for this particular study. A label of confirmed diabetic was given to the patient when the measurements were received. Linkage analyses were done with confirmed patients and unconfirmed patients were included only if they were close relatives of a confirmed index patient. The initial list of patients included 1350 Type II diabetics, but during this study new patients were diagnosed who were relatives of the index patients. All participants with no previous history of diabetes but with elevated fasting glucose were diagnosed according to the WHO criteria as described above. At present date, 1406 Type II diabetics and 266 patients with impaired fasting glucose have participated in the study, together with 3972 of their close relatives.

[0230] This study was approved by the Data Protection Commission of Iceland and the National Bioethics Committee of Iceland. All patients and their relatives who participated in the Study gave informed consents.

Outline of the Study

[0231] This particular genetic study, which has the aim of identifying a genetic variant or a gene that may contribute to type II diabetes by using a positional cloning approach, can be divided into three steps:
[0232] i. Genome-wide linkage study, where excess allele sharing among related type II diabetics is used to identify a chromosomal segment, typically 2-8 Megabases long, that may harbor a disease susceptibility gene/genes.
[0233] ii. Locus-wide association study, where a high-density of microsatellite markers is typed in a large patient and control cohort. By comparing the frequencies of individual alleles or haplotypes between the two cohorts, the location of the putative disease gene/genes is narrowed down to a few hundred kilobases.
[0234] iii. Candidate gene assessment, where additional microsatellites and/or SNPs are typed in all genes that are identified within the smaller candidate region and further association analysis is used to identify which of the genes shows strong association to the disease.
   Linkage Analysis
   Pedigree Construction

[0235] For the linkage analysis, blood samples were obtained from 964 Type II diabetics and 203 individuals with impaired fasting glucose. The patients were clustered into families such that each patient is related to (within and including six meiotic events) at least one other patient. In this manner, 772 patients fell into families—705 Type II diabetics and 67 with impaired fasting glucose. The confirmed Type II patients were treated as probands and clustered into families that each proband is related to, within and including six meiotic events. The other patients, unconfirmed Type II and IFG patients, were added to the families if they were related to a proband within and including three meiotic events. The rational behind this was to include as many patients as possible in the study. Impaired fasting glucose is an immediate diagnosis, and we assumed that the more closely related these patients are to the confirmed diabetics, the likelier they are to have or to develop the disease.

[0236] The families were checked for relationship errors by comparing the identity-by state (IBS) distribution for the set of 906 markers, for each pair of related and genotyped individuals, to a reference distribution corresponding to the particular degree of relatedness. The reference distributions were constructed from a large subset of the Icelandic population. Individuals were excluded from the study if their relationship with the rest of the family was inconsistent with the relationship specified in the geneology database.

[0237] The remaining material that was available for the study was the following: 763 now confirmed Type II patients in 227 families together with 764 genotyped relatives. Of the patients, 667 were confirmed Type II patients, 35 unconfirmed Type II patients, 52 confirmed patients with impaired fasting glucose (IFG) and 9 unconfirmed patients with IFG.

Stratification of the Patient Material

[0238] The patients were classified into two sub-phenotypes based on their BMI: non-obese Type II diabetes are patients who have BMI less than 30, and obese Type II diabetes are patients who have BMI at or above 30. The reason for fractionating the diabetics into non-obese and obese groups is that other factors may be influencing the pathogenesis of disease in these two groups. Obesity alone could be contributing to the diabetic phenotype. Therefore, this factor was separated. Obesity is most likely due to a combination of environmental and genetic factors. This fractionation into non-obese and obese diabetics practically separates the material into two halves; 60% of the patients are in the non-obese category (20% with BMI below 25 (lean) and 40% with BMI between 25-30 (overweight)), and 40% of the patients are in the obese category (BMI above 30).

[0239] An affected-only linkage analysis for each of those sub-phenotypes was performed, using the same set of families as above, but classifying patients not belonging to the particular sub-group as having an unknown disease status. Restricted to a particular sub-phenotype, some families no longer contain a pair of related patients classified as affecteds and hence do not contribute in the linkage analysis. Such families were excluded from the analysis of the particular sub-phenotype. The number of patients and families used in the linkage analysis is summarized in Table 1 below.

[0240] Table 1: The number of patients and families that contribute to the genome-wide linkage scan, both when all the patients are used, and when the analysis is restricted to obese or non-obese diabetic patients, respectively.

TABLE 1
Phenotype and Patients

| | | NO: of families | NO: of patients |
|---|---|---|---|
| | Total Number | contributing to | contributing to |
| Phenotype | of Patients | the analysis | the analysis |
| All diabetics | 763 | 227 | 763 |
| Obese | 296 | 92 | 219 |
| Non-obese | 467 | 154 | 413 |

Genome Wide Scan

[0241] A genome wide scan was performed on 772 patients and their relatives. Nine patients were excluded due to inheritance errors so the linkage analysis was performed with 763 patients and 764 relatives. The procedure was as described in Gretarsdóttir, et al., Am J Hum Genet., 70(3):593-603 (2002). In short, the DNA was genotyped with a framework marker set of 906 microsatellite markers with an average resolution of 4 cM. Alleles were called automatically with the TrueAllele program (Cybergenetics, Co., Pittsburgh, Pa.), and the program DecodeGT (deCODE genetics, ehf., Iceland), was used to fractionate according to quality and edit the called genotypes (Palsson, B., et al., Genome Res., 9(10):1002-1012 (1999)). The population allele frequencies for the markers were constructed from a cohort of more than 30,000 Icelanders that have participated in genome-wide studies of various disease projects at deCODE genetics. Additional markers were genotyped within the locus on chromosome 5 q, where we observed the strongest linkage signal, to increase the information on identity by descent (IBD) sharing within the families. For those markers, at least 180 Icelandic controls were genotyped to derive the population allele frequencies.

[0242] The additional microsatellite markers that were genotyped within the locus were either publicly available or designed at deCODE genetics; those markers are indicated with a DG designation. Repeats within the DNA sequence were identified that allowed us to choose or design primers that were evenly spaced across the locus. The identification of the repeats and location with respect to other markers was based on the work of the physical mapping team at deCODE genetics.

[0243] For the markers used in the genomewide scan, the genetic positions were taken from the recently published high-resolution genetic map (HRGM), constructed at deCODE genetics (Kong A., et al., Nat Genet., 31: 241-247 (2002)). The genetic position of the additional markers are either taken from the HRGM, when available, or by applying the same genetic mapping methods as were used in constructing the HRGM map to the family material genotyped for this particular linkage study.

Statistical Methods for Linkage Analysis

[0244] The linkage analysis is done using the software Allegro (Gudbjartsson et al., Nat. Genet. 25:12-3, (2000)) that determines the statistical significance of excess sharing among related patients by applying non-parametric affected-only allele-sharing methods (without any particular disease inheritance model being specified). Allegro, a linkage program developed at deCODE genetics, calculates LOD scores based on multipoint calculations. Our baseline linkage analysis uses the Sₚₐᵢᵣₛ scoring function (Whittemore, A. S. and Halpern, J., Biometrics 50:118-27 (1994); Kruglyak L, et al., Am J Hum Genet 58:1347-63, (1996)), the exponential allele-sharing model (Kong, A. and Cox, N. J., Am. J. Hum. Genet., 61:1179 (1997)), and a family weighting scheme which is halfway on a log scale between weighting each affected pair equally and weighting each family equally. In the analysis, all genotyped individuals who are not affected are treated as “unknown”. Because of concern with small sample behavior, we usually compute corresponding P-values in two different ways for comparison. The first P-value is computed based on large sample theory; Z₁ᵣ=√(2 logₑ(10) LOD) and is approximately distributed as a standard normal distribution under the null hypothesis of no linkage. A second P-value is computed by comparing the observed LOD score to its complete data sampling distribution under the null hypothesis. When a data set consists of more than a handful of families, these two P-values tend to be very similar.

[0245] All suggestive loci with LOD scores greater than 2 are followed up with some extra markers to increase the information on the IBD-sharing within the families and to decrease the chance that a LOD score represents a false-positive linkage. The information measure we use was defined by Nicolae (D. L. Nicolae, Thesis, University of Chicago (1999)) and is a part of the Allegro program output. This measure is closely related to a classical measure of information as previously described by Dempster etal. (Dempster, A. P., et al., J. R. Statist. Soc. B, 39:1 (1977)); the information equals zero if the marker genotypes are completely uninformative and equals one if the genotypes determine the exact amount of allele sharing by descent among the affected relatives. Using the framework marker set with average marker spacing of 4 cM typically results in information content of about 0.7 in the families used in our linkage analysis. Increasing the marker density to one marker every centimorgan usually increases the information content above 0.85.

Results

[0246] The results of the genome-wide linkage analysis with the framework marker set are shown in FIG. 4 which depicts the allele-sharing LOD-score versus the genetic distance from the p-terminus in centimorgan (cM) for each of the 23 chromosomes. The analysis was performed with the three phenotypes: all Type II diabetics (solid lines), non-obese diabetics (dashed lines) and obese diabetics (dotted lines). A LOD-score of 1.84 is observed on chromosome 5q34-q35.2 with the framework marker set when we use all Type II diabetics in the analysis. When the linkage analysis is restricted to non-obese diabetics, this LOD-score increases to 2.81. The obese diabetics do not show linkage in this region.

[0247] Additional markers were genotyped in this area to increase the information content and to confirm the linkage. The information on the IBD-sharing at this locus was about 78% with the framework marker set. In order to increase the information content, another 38 microsatellite markers were genotyped within a 40 cM region that includes the observed signal. Repeating the linkage analysis including the additional markers increased the LOD-score to 3.64 (P-value=3.18×10⁻⁵) for the non-obese diabetics. For all patients, the peak LOD-score increased to 2.9 (P-value=1.22×10⁻⁴). This is shown in FIG. 5.

[0248] The peak of the LOD-score is centered on marker D5S625 and the region determined by a drop of one in the LOD is from marker DG5S5 to marker D5S429, centromeric and telomeric respectively. The one-LOD-drop is about 9 cM and estimated to be about 3.5 Mb. This 1-LOD-drop roughly corresponds to the 80-90% confidence interval for the location of a putative disease associated gene.

Locus-Wide Association Study

Genotyping to Narrow Down the Region of Linkage

[0249] In order to narrow down the region of interest, the linkage analysis is followed by a comprehensive association study of the 1-LOD-drop. This is necessary as the linkage analysis has limited resolution; it compares sharing among closely related individuals that share on average large chromosomal segments. For the association analysis, we identified a large number of additional microsatellite markers located in the 1-LOD-drop and typed those markers in both our patient cohort and in a large number of unrelated controls randomly selected from the Icelandic population.

[0250] We identified and typed 67 markers in the 1-LOD-drop in addition to the 17 markers already typed and used in the linkage analysis (locus-wide association micorsatellites; Table 6). The new polymorphic repeats (dinucleotide or trinucleotide repeats) were identified with the Sputnik program. We subtracted the smaller allele of CEPH sample 1347-02 (CEPH genomics repository) from the alleles of the microsatellites and used it as a reference. A total of 84 markers were available for the association analysis, i.e., an average density of one marker every 42 kb or one marker every 0.107 cM. All those markers were typed for 590 non-obese diabetics and 477 unrelated controls.

Statistical Methods for Association and Haplotype Analysis

[0251] For single marker association to the disease, we use Fisher exact test to calculate a two-sided P-value for each individual allele. When presenting the results, we use allelic frequencies rather than carrier frequencies for microsatellites, SNPs and haplotypes. Haplotype analyses are performed using a computer program we developed at deCODE called NEMO (NEsted MOdels) (Gretarsdóttir, et al., Nat Genet. 2003 October;35(2):131-8). We use NEMO both to study marker-marker association and to calculate linkage disequilibrium (LD) between markers, and for case-control haplotype analysis. With NEMO, haplotype frequencies are estimated by maximum likelihood and the differences between patients and controls are tested using a generalized likelihood ratio test. The maximum likelihood estimates, likelihood ratios and P-values are computed with the aid of the EM-algorithm directly for the observed data, and hence the loss of information due to the uncertainty with phase and missing genotypes is automatically captured by the likelihood ratios, and under most situations, large sample theory can be used to reliably determine statistical significance. The relative risk (RR) of an allele or a haplotype, i.e., the risk of an allele compared to all other alleles of the same marker, is calculated assuming the multiplicative model (Terwilliger, J. D. & Ott, J. A haplotype-based ‘haplotype relative risk’ approach to detecting allelic associations. Hum Hered 42, 337-46 (1992) and Falk, C. T. & Rubinstein, P. Haplotype relative risks: an easy reliable way to construct a proper control sample for risk calculations. Ann Hum Genet 51 (Pt 3), 227-33 (1987)), together with the population attributable risk (PAR).

[0252] In the haplotype analysis, it may be useful to group haplotypes together and test the group as a whole for association to the disease. This is possible to do with NEMO. A model is defined by a partition of the set of all possible haplotypes, where haplotypes in the same group are assumed to confer the same risk while haplotypes in different groups can confer different risks. A null hypothesis and an alternative hypothesis are said to be nested when the latter corresponds to a finer partition than the former. NEMO provides complete flexibility in the partition of the haplotype space. In this way, it is possible to test multiple haplotypes jointly for association and to test if different at-risk haplotypes confer different risk. As a measure of LD, we use two standard definitions of LD, D′ and R² (Lewontin, R., Genetics, 49:49-67 (1964) and Hill, W. G. and A. Robertson, Theor. Appl. Genet., 22:226-231 (1968)) as they provide complementary information on the amount of LD. For the purpose of estimating D′ and R², the frequencies of all two-marker allele combinations are estimated using maximum likelihood methods and the deviation from linkage disequilibrium is evaluated using a likelihood ratio test. The standard definitions of D′ and R² are extended to include microsatellites by averaging over the values for all possible allele combinations of the two markers weighted by the marginal allele probabilities.

[0253] The number of possible haplotypes that can be constructed out of the dense set of markers genotyped in the 1-LOD-drop is very large and even though the number of haplotypes that are actually observed in the patient and control cohort is much smaller, testing all those haplotypes for association to the disease is a formidable task Note that we do not restrict our analysis to haplotypes constructed from a set of consecutive markers, as some markers may be very mutable and might split up an otherwise well conserved haplotype constructed out of surrounding markers.

[0254] The approach we take to the problem of identifying those haplotypes in the candidate region that show strongest association to the disease is two-fold. First, we restrict the haplotypes we test to span a sub-region small enough that the included markers may be expected to be in substantial LD. In this study, we only consider haplotypes that span less than 300 kb. Second, we apply an iterative procedure that gradually builds up the most significant haplotypes. Starting with haplotypes constructed out of 3 markers, we select those haplotypes that show strong association to the disease, add other nearby markers to those haplotypes and repeat the association test. By iterating this procedure, we expect to identify those haplotypes that show strongest association to the disease.

Results

[0255] For the association analysis, we genotyped 590 non-obese Icelandic Type II diabetes patients and 477 unrelated population controls using a total of 84 microsatellite markers. These markers are distributed evenly across a region of approximately 3.5 Mb. The region is centered on our linkage peak and corresponds to the 1-LOD-drop. We then applied the procedure described above and looked for single-markers and haplotypes consisting of up to 5 markers that showed association to the disease. The result is summarized in FIG. 6. In FIG. 6, we show the location of a marker or a haplotype on the horizontal axis and the corresponding P-value from the association test on the vertical axis. This is shown for all haplotypes tested that have a P-value less than 0.01. The horizontal bars indicated the size of the corresponding haplotypes and the location of all markers is shown at the bottom of the figure. All locations are in Mb and refer to the NCBI Build33.

[0256] We observe a series of correlated haplotypes that show strong association for non-obese diabetics in two locations within the 1-LOD-drop. We denote those regions A (168.37-168.83 Mb) and B (169.70-170.17 Mb), and in Table 10 we list the most significant haplotype in each of those regions. For each haplotype, the table includes a two-sided single-test P-value for association, calculated using NEMO, the corresponding relative risk, the estimated frequency of the haplotype in the patient and the control cohorts, the region the haplotype spans, and the markers and alleles (in bold) that define the haplotype.

[0257] Note, however, that some of the haplotypes listed within each of the two regions are very correlated and should be considered as a single observation of association to the disease. This is demonstrated for region B in Table 3, which lists the pairwise correlation, both D′ and R², between the haplotypes. Based on the correlation, we observe that haplotypes B2 and B4 are strongly correlated and should be considered as a single observation of association to this region. Likewise, haplotypes B1 and B5 are strongly correlated. However, haplotypes B1, B2 and B3 are all weakly correlated with each other; and in fact, B1 and B2 are mutually exclusive, i.e., never appear jointly on the same chromosome. These three haplotypes hence constitute three almost independent observations of association to non-obese diabetes of this region within the locus. It is possible to test haplotypes B1, B2 and B3 together as a group for association to non-obese diabetes. This test yields a P-value=8.5×10⁻⁸ with a corresponding relative risk of 5.2, a population attributable risk of 13.9%, and an allelic frequency of 0.089 and 0.018 in the patient and the control cohorts, respectively.

TABLE 2
Haplotypes within the 1-LOD-drop that show the strongest association to
non-obese diabetes. For each haplotype, we show (i) a two-sided P-value for a single
test of association to non-obese diabetes, (ii) the corresponding relative risk (RR), (iii)
the estimated allelic frequency of the haplotype in the patient and the control cohort,
(iv) the span of the haplotype (refering to NCBI 33) and (v) the alleles (in bold) and
markers that define the haplotype. The haplotypes are separated into two groups, A
and B, corresponding to two different regions within the 1-LOD-drop.

| | | | | | Span | |
|---|---|---|---|---|---|---|
| | P-value | RR | Aff.frq | Ctrl.frq | (Mb) | Haplotype |
| A1 | 0.000005 | >10 | 0.033 | 0.000 | 168.37-168.72 | 0 DG5S879 4 DG5S881 −4 D5S2075 |
| | | | | | | 0 DG5S883 4 DG5S38 |
| A2 | 0.000006 | 3.81 | 0.053 | 0.015 | 168.55-168.77 | 4 DG5S1058 −6 DG5S37 |
| A3 | 0.000008 | 3.64 | 0.054 | 0.015 | 168.55-168.83 | 4 DG5S1058 −6 DG5S37 0 |
| | | | | | | DG5S101 |
| A4 | 0.000015 | 6.18 | 0.046 | 0.008 | 168.40-168.72 | 4 DG5S881 4 DG5S1058 −4 |
| | | | | | | D5S2075 0 DG5S883 4 DG5S38 |
| A5 | 0.000015 | 4.42 | 0.047 | 0.011 | 168.37-168.77 | 0 DG5S879 4 DG5S1058 −6 |
| | | | | | | DG5S37 |
| A6 | 0.000018 | 6.94 | 0.045 | 0.007 | 168.40-168.72 | 4 DG5S881 −4 D5S2075 0 DG5S883 |
| | | | | | | 4 DG5S38 |
| B1 | 0.000011 | >10 | 0.039 | 0.000 | 169.87-170.17 | 0 DG5S953 0 DG5S955 0 DG5S13 5 |
| | | | | | | DG5S959 |
| B2 | 0.000023 | >10 | 0.034 | 0.000 | 169.65-169.87 | 27 DG5S888 0 DG5S953 |
| B3 | 0.000023 | 5.26 | 0.049 | 0.010 | 169.87-170.04 | 0 DG5S953 0 DG5S955 4 DG5S124 |
| B4 | 0.000031 | >10 | 0.034 | 0.000 | 169.65-169.87 | 27 DG5S888 0 DG5S44 0 DG5S953 |
| B5 | 0.000060 | >10 | 0.034 | 0.000 | 169.87-170.17 | 0 DG5S953 0 DG5S955 0 DG5S13 0 |
| | | | | | | DG5S123 5 DG5S959 |

[0258] TABLE 3
Pairwise correlation between the five haplotypes in the
B-region that show the strongest association to non-obese
diabetes. Estimates of D′ are shown in the upper right
corner, and estimates of R² are shown the the
lower left corner. The haplotypes are labelled
B1, ..., B5 as in Table 2.

| | D′ | | | | | |
|---|---|---|---|---|---|---|
| | | B1 | B2 | B3 | B4 | B5 |
| R2 | B1 | — | 0 | 0 | 0 | 1 |
| | B2 | 0 | — | 0.4 | 1 | 0 |
| | B3 | 0 | 0.1 | — | 0.35 | 0 |
| | B4 | 0 | 0.96 | 0.7 | — | 0 |
| | B5 | 0.92 | 0 | 0 | 0 | — |

Investigation of Region B
Genes in Region B

[0259] We next identified all genes in and around region B (UCSC). In the region defined by the five most significant haplotypes, 169.70-170.17 Mb, there are four genes, LCP2 (lymphocyte cytosolic protein 2), KCNMB1 (potassium large conductance calcium-activated channel, subfamily M, beta member 1), KChIP1 (Kv channel interacting protein 1) and GABRP (gamma-aminobutyric acid (GABA) A receptor, pi). Of those genes, KChIP1 is by far the largest, stretching from 169.7 to 170.1 MB, or almost the entire span of the observed haplotype association. The other three genes are small. In addition, there is a big gene, RANBP17 (RAN binding protein 17), just telomeric of the location of the observed association signal. The relative location of all the genes is shown in FIG. 7, which shows the location of the exons of KCHIP1 as solid bars, and the location of the other genes as shaded boxes. In addition, FIG. 7 shows the location of the microsatellites (filled boxes) that we have typed in this region and the location of the at-risk haplotypes B1, . . . , B5 (gray horizontal lines).

Description of New Splice Variants of KChIP1 Identified by RACE and PCR

[0260] The published sequence for KChIP1 comprises exons 1 to 8. New exons belonging to the KCHIP1 gene and four different splice variants were discovered by performing RACE or PCR (primers within the exons) using as template human Marathon cDNA and cDNA prepared from rat pancreatic INS1 beta cells. In all, 6 new exons located in the 5′ region of the gene were discovered. An alternative exon 1 was found that we call exon 1a. Here, we label the published sequence for exon 1 with a “b” to distinguish it from the alternative exon 1, exon 1a. Four exons are called UTR 1, UTR 2, UTR 3 and UTR 4, or untranslated region 1-4, because they lie upstream of exon 1b and they are not translated. The last exon to be identified is called Ins-r, or insert rodent, because it was known to be present in mouse and rat, and has recently been demonstrated by others to be present in humans as well (Boland et al., Am J Physiol Cell Physiol 285, C161-170. (2003)). See nucleotide sequences of the new exons below, as well as their location in the genomic sequence of NCBI build 33. Even if not mentioned, all new variants of KChIP1 found and described below include exons 2-8 of the published sequence.

[0261] Splice variant 1 consists of exon 1a, UTR1, UTR2, UTR3, UTR4 and exon 1b. Exon 1a is untranslated and the resulting protein is identical in amino acid sequence to KChIP1 described by An et al. (Nature 430, 553-556 (2000), see also FIG. 2). This variant was observed in human heart and testis and the rat INS1 cell line.

[0262] Splice variant 2 consists of exon 1b and the Ins-r exon giving rise to a protein that is identical in amino acid sequence to KChIP1 described by Boland et al. This variant was observed in human brain, heart, pancreas and the rat INS1 cell line.

[0263] Splice variant 3 consists of exon 1a and is identical in nucleotide sequence to AL538404, an EST in NCBI. The amino acid sequence of the N-terminus coded by exon 1a is unique (see sequence below) but the amino acid sequence coded by exons 2-8 is that of the published sequence. This variant was observed in human brain, heart, pancreas, skeletal muscle, adipose tissue, liver, hypothalamus, small intestine, testis and the rat INS1 cell line.

[0264] Splice variant 4 consists of exons 1a and UTR1, which would result in a protein translated from exons 2-8. The second methionine in exon 2 has a Kozak sequence. This variant was observed in human heart.

[0265] The nucleotide sequences of the new exons are as follows (the genomic locations given are from NCBI build 33, see also Table 8):

| | |
|---|---|
| Exon 1a: 169716298-169716511 (Build 33) | |
| GGCTTCAGGGGTGCATCCGTCACTCAGGGTTCATTCACCCAGGCAGGCTCCAAGT | (SEQ ID NO: 4) |
| TCCTGGGGTGCACAAGGTGGGCACTGTCCCTTCTGGGTGCTGACAGCAGAGCCTG | |
| GCTCCCCTCCGCCACCATGAGCGGCTGCTCCAAAAGATGCAAGCTTGGGTTCGTG | |
| AAATTTGCCCAGACCATCTTTAAGCTCATCACTGGGACCCTCAGCAAAG | |
| UTR 1: 169848417-169848523 (Build 33) | |
| ACTCAGCATCATGAAGACTGGAGGGACAGAGCATTTGAATCATCAGAGGCTGGGC | (SEQ ID NO: 5) |
| CAGACGTCACCCCACGCGTTTTCTCATTTTATC GTCCTAAGAAGCCCAGAAG | |
| UTR 2: 169861083-169861154 (Build 33) | |
| CCTGAATGCAATTTGCAATGAGGAGATGATTTGATTTTCTTCAGCCCTAGACCTCC | (SEQ ID NO: 6) |
| AGCTTCCTGAGAGCAG | |
| UTR 3: 169864589-169864679 (Build 33) | |
| GGGTTCCCCAGGAGACCACGACAGAGGCCTGGAACCCAAGTTCTAATCCCACATC | (SEQ ID NO: 7) |
| CTGGCTGGGCAACTTCAGGCAAATTTCTAACACAAG | |
| UTR4: 169867066-169867173 (Build 33) | |
| GGTAGGGGAGGGGCCGGGCCCGGGGTCCCAACTCGCACTCAAGTCTTCGCTGCCA | (SEQ ID NO: 8) |
| TGGGGGCCGTCATGGGCACCTTCTCATCTCTGCaAACCAAACAAAGGCGACCC | |
| Ins-r 170075401-170075433 | |
| ACATCGCCTGGTGGTATTACCAGTATCAGAGAG | (SEQ ID NO: 9) |
| The nucleotide sequence derived from splice variant 4 | |
| (KChIP1.4) with the ATG and a Kozak sequence | |
| ((G/ANNATGG) underlined is as follows: | |
| ATAAGATTGAAGATGAGCTGGAGATGACCATGGTTTGCCATCGGCCCGAGGGACT | (SEQ ID NO: 10) |
| GGAGCAGCTCGAGGCCCAGACCAACTTCACCAAGAGGGAGCTGCAGGTCCTTTAT | |
| CGAGGCTTCAAAAATGAGTGCCCCAGTGGTGTGGTCAACGAAGACACATTCAAGC | |
| AGATCTATGCTCAGTTTTTCCCTCATGGAGATGCCAGCACGTATGCCCATTACCTC | |
| TTCAATGCCTTCGACACCACTCAGACAGGCTCCGTGAAGTTCGAGGACTTTGTAAC | |
| CGCTCTGTCGATTTTATTGAGAGGAACTGTCCACGAGAAACTAAGGTGGACATTT | |
| AATTTGTATGACATCAACAAGGACGGATACATAAACAAAGAGGAGATGATGGAC | |
| ATTGTCAAAGCCATCTATGACATGATGGGGAAATACACATATCCTGTGCTCAAAG | |
| AGGACACTCCAAGGCAGCATGTGGACGTCTTCTTCCAGAAAATGGACAAAAATAA | |
| AGATGGCATCGTAACTTTAGATGAATTTCTTGAATCATGTCAGGAGGACGACAAC | |
| ATCATGAGGTCTCTCCAGCTGTTTCAAAATGTCATGTAACTGGTGACACTCAGCCA | |
| TTCAGCTCTCAGAGACATTGTACTAAACAACCACCTTAACACCCTGATCTGCCCTT | |
| GTTCTGATTTTACACACCAACTCTTGGGACAGAAACACCTTTTACACTTTGGAAGA | |
| ATTCTCTGCTGAAGACTTTCTATGGAACCCAGCATCATGTGGCTCAGTCTCTGATT | |
| GCCAACTCTTCCYCTTTCTTCTTCTTGAGAGAGA | |
| The protein sequences resulting from the splice variants | |
| are as follows: | |
| KChIP1.3 | |
| (The amino acid sequence derived from splice variant 3 | |
| (KChIP1.3), the underlined amino acids are coded by | |
| exon 1a.) | |
| MSGCSKRCKLGFVKFAQTIFKLITGTLSKDKIEDELEMTMVCHRPEGLEQLEAQTNFT | (SEQ ID NO: 11) |
| KRELQVLYRGFKNECPSGVVNEDTFKQIYAQFFPHGDASTYAHYLFNAFDTTQTGSV | |
| KFEDFVTALSILLRGTVHEKLRWTFNLYDINKDGYINKEEMMDIVKAIYDMMGKYTY | |
| PVLKEDTPRQHVDVFFQKMDKNKDGIVTLDEFLESCQEDDNIMRSLQLFQNVM | |
| KChIP1.2 | |
| (The amino acid sequence derived from splice variant 2 | |
| (KChIP1.2), the underlined amino acids are coded by exon | |
| Ins-r.) | |
| MGAVMGTFSSLQTKQRRPSKDIAWWYYQYQRDKIEDELEMTMVCHRPEGLEQLEA | (SEQ ID NO: 12) |
| QTNFTKRELQVLYRGFKNECPSGVVNEDTFKQIYAQFFPHGDASTYAHYLFNAFDTT | |
| QTGSVKFEDFVTALSILLRGTVHEKLRWTFNLYDINKDGYINKEEMMDIVKAIYDMM | |
| GKYTYPVLKEDTPRQHVDVFFQKMDKNKDGIVTLDEFLESCQEDDNIMRSLQLFQNV | |
| M | |
| KChIP1.4 | |
| (The amino acid sequence derived from splice variant 4 | |
| (KChIP1.4).) | |
| MVCHRPEGLEQLEAQTNFTKRELQVLYRGFKNECPSGVVNEDTFKQIYAQFFPHGDA | (SEQ ID NO: 13) |
| STYAHYLFNAFDTTQTGSVKFEDFVTALSILLRGTVHEKLRWTFNLYDINKDGYINKE | |
| EMMDIVKAIYDMMGKYTYPVLKEDTPRQHVDVFFQKMDKNKDGIVTLDEFLESCQE | |
| DDNIMRSLQLFQNVM | |

Identification of SNPs and Microsatellites

[0266] In order to identify SNPs across KChIP1, all exons of KCHIP1 and their flanking regions were sequenced on 94 non-obese diabetic patients. As a consequence, 31 SNPs were identified (Table 9). Additional SNPs were identified across the gene by selecting SNPs from the public domain (US National Center for Biotechnology Information's SNP database) and designing SNP assays for them. (Table 10).

[0267] We genotyped SNPs on 470 non-obese diabetics and 658 population-based controls using a method for detecting SNPs with fluorescent polarization template-directed dye-terminator incorporation (SNP-FP-TDI assay) (Chen, X., Zehnbauer, B., Gnirke, A. & Kwok, P. Y. Proc. Natl. Acad. Sci. USA 94, 10756-10761 (1997)).

Association Study of Genes in Region B

[0268] We tested all the genes in and around Region B (LCP2, KCNMB1, KChIP1, GABRP and RANBP17) individually for association to non-obese diabetes. In the analysis of each gene, we included all SNPs identified, and previously typed microsatellites, in and close to that gene. The association analysis was carried out in the same way as the locus-wide association, i.e., using the iterative approach, we search for haplotypes, shorter than 300 kb, that showed strongest association to the disease.

[0269] The strongest association observed was for KChIP1. For KChIP1, we tested 25 markers, 7 microsatellites and 18 SNPs, for association (Table 11). The strongest association signal was observed in the 3′-end of the gene; a three marker haplotype with a P-value=9.2×10⁻⁵, relative risk 12, and allelic frequency 3.6% and 0.3% in the patient and control cohorts, respectively. This haplotype, which extends over the last 8 exons of KChIP1, from 169.96 to 170.11 Mb, is listed in Table 4 as D1. We also observed another haplotype in the same region that showed association to non-obese diabetes, albeit less significant than D1, with a P-value=0.037, relative risk 1.69 and allelic frequency 7.8% and 4.8% in the patient and the control cohorts, respectively. This haplotype is labelled D2 in Table 4. For risk haplotypes, the corresponding population attributable risk is PAR=4.9% for D1 and PAR=4.7% for D2. However, as D1 and D2 are independent haplotypes, i.e., they do not appear jointly on the same chromosome, their population attributable risk can be added together.

TABLE 4
Microsatellite and SNP haplotype association within
KChIP1. The two independent haplotypes D1 and
D2 are located in the 3′-end of the gene, from
169.96-170.11 Mb. Shown are results of a test
of association for non-obese diabetics vs population controls
for both haplotypes in a cohort of Icelandic diabetics
(top) and a replication in a cohort of Danish diabetics
(bottom). Note that we report one-sided P-values for
the test on the Danish cohort as that is a replication of
association results previously observed in the Icelandic cohort.

| | | | Aff. | Ctrl. | |
|---|---|---|---|---|---|
| | P-Value | RR | frq. | frq | Haplotype |
| Icelandic | | | | | |
| D1 | 9.20E−05 | 12 | 0.036 | 0.003 | −4 DG5S13 C KCP_1152 |
| | | | | | 0 D5S625 |
| D2 | 0.037 | 1.69 | 0.078 | 0.048 | 0 DG5S124 C KCP_1152 |
| | | | | | C KCP_2649 T |
| | | | | | KCP_4976 A |
| | | | | | KCP_16152 |
| Danish | | | | | |
| D1 | 0.052* | 2.98 | 0.031 | 0.011 | −4 DG5S13 C |
| | | | | | KCP_1152 0 |
| | | | | | D5S625 |
| D2 | 0.002* | 2.74 | 0.098 | 0.038 | 0 DG5S124 C |
| | | | | | KCP_1152 C |
| | | | | | KCP_2649 T KCP_4976 |
| | | | | | A KCP_16152 |

*One-sided P-value

Replication in a Cohort of Danish Diabetics

[0270] We typed the markers that define the two at-risk haplotypes, D1 and D2, in a cohort of 149 non-obese Danish females that have been diagnosed with diabetes and/or measured >7 mM glucose who participated in a Danish PERF (Prospective Epidemiological Risk Factors) study. As controls, we used 346 females from the same study that answered no to a question about their diabetes status and/or measured <7 mM glucose.

[0271] The results of the association test for the two at-risk haplotypes, identified in the Icelandic diabetes cohort, are listed in Table 4. Both haplotypes appear in higher frequency in the non-obese Danish diabetics than in the control cohort. For haplotype D1, the association to non-obese diabetes is only marginally significant, with a one-sided P-value=0.05, and the relative risk of the at-risk haplotype is RR=3.0, somewhat less than is observed for the Icelandic non-obese diabetics. Note, however, that the estimated frequency of haplotype D1 is very low, especially in the control cohorts, hence the estimates of the relative risk are not very reliable. For haplotype D2, on the other hand, we do observe a statistically significant association with a one-sided P-value=0.002 and relative risk=2.74. Note that as the test of association of haplotypes D1 and D2 are attempts to replicate the association we have observed for Icelandic non-obese diabetics, it is appropriate to report one-sided P-values for those tests.

Additional SNP Genotyping for KChIP1

[0272] Having observed association to the 3′-end of KCHIP1, both in Icelandic and Danish non-obese diabetics, we subsequently sequenced 94 Icelandic individuals, ⅓ non-obese type II diabetes patients with the observed haplotype D1, ⅓ additional non-obese type II diabetes patients and ⅓ controls. The purpose of the sequencing was to identify additional SNPs. We identified 725 SNPs (Table 12). Many of those SNPs were completely correlated so we removed several redundant SNPs from further genotyping. Some SNPs with very low minor allele frequencies were also ignored. Of the 725 identified SNPs plus what was originally identified, 108 were selected for further genotyping in the Icelandic cohort (Table 13).

[0273] A single-marker test of association was performed on non-obese diabetes for each of the additional SNPs we typed, although none of the SNPs showed a strong association. We did, however, observe that three of the SNPs, KCP_{—}197678, KCP_{—}197775 and KCP_{—}202795, increased the specificity of haplotype D2, if added to that haplotype, while still retaining most of its sensitivity. This is shown in Table 5, both for the association in the Icelandic and in the Danish cohorts. This increases the value of the at-risk haplotype as a diagnostic tool. Note that the three SNPs are very correlated to each other, with pair wise correlation coefficients D′≈0.96 and R²≈0.9, hence the association of haplotypes D3, D4 and D5 to non-obese diabetes should be considered as a single observation.

[0274] In addition to the refinement of the at-risk haplotype D2, we observed another refinement of the at-risk haplotype, consisting of three SNPs only, that was very correlated with the three at-risk haplotypes, D3, D4 and D5, with pair wise correlation coefficients D′≈0.83 and R²≈0.59, This haplotype is included in Table 5 as D6.

TABLE 5
Microsatellite and SNP haplotype association within KChIP1. Shown is association
of the at-risk haplotype D2, and of further refinements of that haplotype; haplotypes D3, D4
and D5, to non-obese diabetes. This is shown both for the Icelandic and the Danish cohorts
and, as in Table 4, we report one-sided P-values for the association test in the Danish cohort.
Finally, we include the result of association to non-obese diabetes, in the Icelandic cohort, of
a 3 SNP haplotype, D6, that is strongly correlated with the at-risk haplotoypes D3, D4 and
D5.

| | P- | | | | Ctrl.f | |
|---|---|---|---|---|---|---|
| | Value | RR | PAR | Aff.frq. | rq | Haplotype |
| Icelandic | | | | | | |
| D2 | 0.037 | 1.69 | 6.3% | 0.078 | 0.048 | 0 DG5S124 C KCP_1152 C KCP_2649 T |
| | | | | | | KCP_4976 A KCP_16152 |
| D3 | 0.022 | 2.19 | 5.5% | 0.052 | 0.024 | 0 DG5S124 C KCP_1152 C KCP_2649 T |
| | | | | | | KCP_4976 A KCP_16152 T KCP_197678 |
| D4 | 0.052 | 2.03 | 4.6% | 0.046 | 0.023 | 0 DG5S124 C KCP_1152 C KCP_2649 T |
| | | | | | | KCP_4976 A KCP_16152 T KCP_197775 |
| D5 | 0.023 | 2.14 | 5.5% | 0.052 | 0.025 | 0 DG5S124 C KCP_1152 C KCP_2649 T |
| | | | | | | KCP_4976 A KCP_16152 C KCP_202795 |
| D6 | 0.054 | 1.77 | 4.0% | 0.046 | 0.027 | A KCP_173982 C KCP_15400 C |
| | | | | | | KCP_18069 |
| Danish | | | | | | |
| D2 | 0.002* | 2.74 | 12.0% | 0.098 | 0.038 | 0 DG5S124 C KCP_1152 C KCP_2649 T |
| | | | | | | KCP_4976 A KCP_16152 |
| D3 | 0.0046* | 2.60 | 9.0% | 0.076 | 0.030 | 0 DG5S124 C KCP_1152 C KCP_2649 T |
| | | | | | | KCP_4976 A KCP_16152 T KCP_197678 |
| D4 | 0.0004* | 3.69 | 11.3% | 0.078 | 0.023 | 0 DG5S124 C KCP_1152 C KCP_2649 T |
| | | | | | | KCP_4976 A KCP_16152 T KCP_197775 |
| D5 | 0.0002* | 3.67 | 11.7% | 0.084 | 0.024 | 0 DG5S124 C KCP_1152 C KCP_2649 T |
| | | | | | | KCP_4976 A KCP_16152 C KCP_202795 |

*One-sided P-value

Allele Numbering System

[0275] SNP alleles are indicated by the letters found in the DNA sequence. In general the alleles can be references by A=0, C=1, G=2 and T=3. For microsatellite alleles, the CEPH sample (Centre d'Etudes du Polymorphisme Humain, genomics repository) is used as a reference, the lower allele of each microsatellite in this sample is set at 0 and all other alleles in other samples are numbered according in relation to this reference. Thus allele 1 is 1 bp longer than the lower allele in the CEPH sample, allele 2 is 2 bp longer than the lower allele in the CEPH sample, allele 3 is 3 bp longer than the lower allele in the CEPH sample, allele 4 is 4 bp longer than the lower allele in the CEPH sample, allele −1 is 1 bp shorter than the lower allele in the CEPH sample, allele −2 is 2 bp shorter than the lower allele in the CEPH sample, and so on.

Table 6:

[0276] The DNA sequence of the microsatellites employed for the C05 locus wide association (including Build 33 locations).

[0277] Y═C or T; S═C or G; R=A or G; W=A or T; M=A or C; K=G or T.

TABLE 6

| | | | |
|---|---|---|---|
| Name | Position | Nucleic Acid Sequence | SEQ ID NO: |

| | | | |
|---|---|---|---|
| DG5S5 | 167638990- | TCCTCAGAACAGGTGCAACACAGTGTGTTTTGCTGGGG | SEQ ID NO: 14 |
| | 167639163 | AAAAGGGATGTCAAGCAATCTATGACGGGGGTGCAGG | |
| | | GAGTCTGGGGAGAAACACAAGGAAGTGTGTGTGTGTG | |
| | | TGTGTGTGTGTGTGTGTGAATGTGTGTGTGTGTGAGAG | |
| | | AGAGAGCTGGTGTTTGTGTTCCA | |
| D5S671 | 167657904- | GGAATGTGCCAAGACATTCTTTAGGGTTGGTAACCAG | SEQ ID NO: 15 |
| | 167658237 | AGACGCTATTTTGTCCTTGGTGGCTAAGAAATCACTTT | |
| | | TCTGACTGAAGGNCCATTTGACTTACTTCTTTTAAATT | |
| | | CAGGGGAATGGGTGGGCATCTCCATGATTCAGGTAAG | |
| | | GAAAAATCCAAGGNAAATAAACACACACACACACAC | |
| | | ACACACACACACACACACACGGAGTAGAAATTTTTAG | |
| | | TGCAATTTTTTGTCTCACAGCATTAATTAATTGCAGGG | |
| | | ATATAACTACCTTGGCAGAATTTTTTCTCCCCAACCCA | |
| | | CCACCCCCCGGAATAAGTTTGGCTCTTTTCAGCT | |
| DG5S870 | 167719773- | TGCCCACTCATAAGATGCTGAGGTTACAACTGTTAATA | SEQ ID NO: 16 |
| | 167719939 | AGATATTAAGATACTGTCTTTTTCTTCCTCTTTCTCTCT | |
| | | TACACACACACACACACACACACACACACACTTTTTG | |
| | | GGCCAACTGGAAATTCATACATTCTCCCCAGCACTGGA | |
| | | GCTCAAAGCGTCTG | |
| D5S671 | 167657904- | GGAATGTGCCAAGACATTCTTTAGGGTTGGTAACCAG | SEQ ID NO: 17 |
| | 167658237 | AGACGCTATTTTGTCCTTGGTGGCTAAGAAATCACTTT | |
| | | TCTGACTGAAGGNCCATTTGACTTACTTCTTTTAAATT | |
| | | CAGGGGAATGGGTGGGCATCTCCATGATTCAGGTAAG | |
| | | GAAAAATCCAAGGNAAATAAACACACACACACACAC | |
| | | ACACACACACACACACACACGGAGTAGAAATTTTTAG | |
| | | TGCAATTTTTTGTCTCACAGCATTAATTAATTGCAGGG | |
| | | ATATAACTACCTTGGCAGAATTTTTTCTCCCCAACCCA | |
| | | CCACCCCCCGGAATAAGTTTGGCTCTTTTCAGCT | |
| DG5S870 | 167719773- | TGCCCACTCATAAGATGCTGAGGTTACAACTGTTAATA | SEQ ID NO: 18 |
| | 167719939 | AGATATTAAGATACTGTCTTTTTCTTCCTCTTTCTCTCT | |
| | | TACACACACACACACACACACACACACACACTTTTTG | |
| | | GGCCAACTGGAAATTCATACATTCTCCCCAGCACTGGA | |
| | | GCTCAAAGCGTCTG | |
| DG5S85 | 167721558- | TTGTTGTTGTTGGTGGTGGTGGGGTGTGTGTGTGTGTG | SEQ ID NO: 19 |
| | 167721918 | TGTGTGTGTGTGTGTGTGTGTGTTCGAGACAGACTCTC | |
| | | ACTCTGTCACCCAGGCTGGAGTGCAGTGGCACGATCT | |
| | | GGGTTCACTGCAACCTCTACTTCCTCAGCTCCAAGGAT | |
| | | CCTCTCACCTCCACCTCCCAAGTAGCTGGGACTACAGG | |
| | | TACGCGCCACCATGTCTGGCTAATTTTTTTGTATTGGA | |
| | | GAGACAGGGTTCCACCATGTTGCCCGGGCTAGTGTTGC | |
| | | ACTCCTGAGCTCAGGTGATCCACCCACCTCAACGTCCC | |
| | | CAAGTGCTGGGATTAGAGGCGTGAGCCACCACGTCTG | |
| | | GCCTATACACTATAGAGTTT | |
| DG5S90 | 167766290- | TCTGGACAGGACCAGGAGTTGGCTGCTGTCAGCCTTTG | SEQ ID NO: 20 |
| | 167766502 | CCCCACCTCTCTGTGGCTACTGGGTATGTGAATCTCTC | |
| | | AAGGCCTGAAGAGAGGACAGCTGAGGAATTTGGAAAT | |
| | | CCTAAAACACATGCATACACACACACACACACACACA | |
| | | CACACACACACACACACACTTTTCTTTCCCTTAAAAAA | |
| | | AAAAAGATTCATTCACCGTGTGCA | |
| DG5S874 | 167846718- | CTGTCTACACTACCCACCCATTAGTCACTTATTAGCCC | SEQ ID NO: 21 |
| | 167847065 | TCTGAATTACTGGATTGAAAAAACATAGTATATATATA | |
| | | GGGCTTGGTACTATTCACGGTTTCAGGCATCCACTGAG | |
| | | GGGTGTTGCAATGTATCTCCCACGGATAAGGAAGGAC | |
| | | TGGTATATTAACACTTTTATTTGATTTACAAAATAAAG | |
| | | GATAGTTTATATAGTTCTGGGTAAAATTAATTAATTAA | |
| | | TTTAAAAGGAAAAAAGATAAAGGCAAACTTTAAGCTT | |
| | | GTTAAAAATTAAGTAAAATAATTTGGATTATTTAATTG | |
| | | GACAAAGAGGACTGGCTTTGCCAATGAAACAATATGG | |
| | | CCGACATG | |
| DG5S88 | 167864864- | GGACCTTCTTTCTGCCCTAAAACCGCAATATCATTATA | SEQ ID NO: 22 |
| | 167865059 | ATAACAAATATATATATATATATATATATATTTTTTTTT | |
| | | TTTAAAACAATCTTGCTATGTTGCCTAGGCTGGTGTGG | |
| | | AACTCCTGGCCTCAAGTGATCCTCCCACCTCGGCCTCC | |
| | | CAGAGTGCTGGGATTATAGACATGAACTACCATACCC | |
| | | AGCCA | |
| DG5S7 | 167910343- | CACAGCCATCAAGTTTCCAACTTACTGCCTCACATATT | SEQ ID NO: 23 |
| | 167910651 | AAGATGATTTTTTTAAACAAACTTAACAGGCGATGGAT | |
| | | ACTCCATTCTCCATGATGTGCTTAATTCACATGCATGC | |
| | | TTGTATCAAAACATCTCACATACTCCATAAAGCCTGTA | |
| | | ATCCCAACACTTTGGGATGCCAAGGTGGGTGGATCAC | |
| | | TTGAGCCCAGGAGTTTGAGAACAGCCTGGACAACATG | |
| | | GCGAAACCCCATTTACACACACACACACACACACACA | |
| | | CACACACACCACACAAACAAAATGAAACAAACACCTA | |
| | | ACCAACAA | |
| DG5S6 | 167952553- | TCCTAACGGCTGCTACCACTAAAGATCTTAGCATGGTG | SEQ ID NO: 24 |
| | 167952858 | TGTGTGTGCGTGTGTGTGTGTGTGTGTGTGTGTGTGTG | |
| | | TGTGTGGTGGGGCTATTAGTAAGGCTAGAAGTGAAA | |
| | | AAGCTAGTAGAAAGCCCATGGTGATGGAGAATGGAGG | |
| | | AAGACTGATTAGGGAGCTCCTCAGCAGTATAAGGAAG | |
| | | GACTAAGAGCACATAAGGACAGGATCATAGAATTCCG | |
| | | CATCTCAGGATTTTTGAGGCTGCCACTGCCTTAGCTGT | |
| | | GAGGCCAGTGCATATAAGAATAGTTTGCACAGTTCTG | |
| | | CTGTGG | |
| DG5S87 | 167992779- | CCTCTGGGATTAGCCTCTCAGGGTACAGATATAACGAT | SEQ ID NO: 25 |
| | 167993149 | GATTGAGTTGGCTTATGTATGTGTGTGTTGTGTGTGTG | |
| | | TCTGTGTGTGTGTGTGAGAGAGAGAGAGAGAGAGAGA | |
| | | GAGAGAGTGACAGAGAGAGAATGAGAGAGAACTGGA | |
| | | AGTTGTCAACAAGAAGAGTCAAACTCTGTAAAATATT | |
| | | TGAAGAGATTTATTCTGAGCCAAATAGGAGTGCCACA | |
| | | GCCCCGGGAGATCCTAAGAACATGTGCCCAGAGTAGT | |
| | | CAAGCTATAGTTTGGTTTTATACATTTTAGGGAGACAT | |
| | | AAGACATCAGTCAATACATGTAAGATGCACATTGATA | |
| | | CACTGGTTTAGTAGGGAAAGGTGGGACAACTCGAA | |
| DG5S91 | 168014827- | GGTGCCAATTAAATCCAACAAGGTAGCTGAGTGTGGT | SEQ ID NO: 26 |
| | 168015078 | GGTGCACGCCTGTAGTCCTAGCTATGCAGGAGGCTGA | |
| | | GGTGGGAGGATCACTTGAGCCTGGGAGGTCGAGGCTG | |
| | | CTGTGAGCTGTGATTGCACCGCTGCATTCCAGCCTGGG | |
| | | AGACAGAGCAAGATCCTGACACACACACACACACACA | |
| | | CACACACACACACACACACACACACATTCCAACAAGG | |
| | | TAATGTGTAGGAGGAAGTACCCGAGCTT | |
| DG5S92 | 168065529- | CAACTCCTGCAGCCCTTTACGCCAAGCACAGAAATCC | SEQ ID NO: 27 |
| | 168065864 | AGGAGGCAGAGCCTAGCGCTTGATGACATGGTAATTG | |
| | | GGCCTGGAAGTGGGGATTTCTGTCACTTACCTCTCCTT | |
| | | GAAAAATAATCACTATTGCCAACGCCTGGTTAATTAGC | |
| | | CTGATTCAATTCTCTTCAGCCTCATTTTGCTCAAATCTA | |
| | | CCAGATTTGTGGTGCTCCTTGGTCCTCCACCACACTTT | |
| | | CTACCCCTCATCCCACTTTGTGTGTGTGTGTGTGTGTGT | |
| | | GTGTGTGTGTGTGTGTGTGTGTGTGTGTGTGTAGGACA | |
| | | TGGGCAGGAATCCTGACTGGCTTCCTTTAAA | |
| DG5S491 | 168081175- | AAGACCACCCTCCTGTTGTGCTCTCCTGAAATGTATTC | SEQ ID NO: 28 |
| | 168081342 | ATATCCACCCATACACACACACACACACACACACACA | |
| | | CACACACACACACACACACACACACACATTCTCTCTCT | |
| | | CTCTCTCTTTCTCTCTCTCTCTTAAATGTCAGTTTTCTCT | |
| | | TCCTGCTTTCCAGA | |
| DG5S9 | 168139425- | CTTGACATTCAGGGCCTTCTGAGTACATCATCTTGTCA | SEQ ID NO: 29 |
| | 168139680 | AGAAACACTGAACTATTCAGTACACAACAGGTCAGAG | |
| | | GTGCCCATTTGATAGCCTGAGGATGGAATCCTTATTGC | |
| | | AGCATTTTGCGTCATGCCACATATATGTGTTTTTTCAAT | |
| | | CCTCCTCTGTTTTAAAAATTGGAAAATTTCATACAACA | |
| | | CACACACACACACACACACACACACACACACACACAC | |
| | | ACCCCCCATACCACACCACACCACATCA | |
| DG5S876 | 168266982- | AGCCTCTGACTCTCCTCTGTGGGGCTAATCCAGAAAAT | SEQ ID NO: 30 |
| | 168267134 | CTTACTTTAGAAATAACAATAATAATAATAATAATAAT | |
| | | AATAATACCTCATTCATCTTTACTTATCATGTGCTAGT | |
| | | ATGTTTCTAAGCCTTTTGGCATAGCCTTCAATGTCCCT | |
| DG5S97 | 168286866- | CTCTTCCCATGTCCTGCTTCTCTCCTTCCTGCGGGTTGG | SEQ ID NO: 31 |
| | 168287096 | GACCCAGTACCCTCCATCTCTCTCACTCCTCCCCTCTCA | |
| | | AACCCTTCTTTTAGGAAAGGAGTCCAAATCGACCACTT | |
| | | ACACCTCAGTTCAATGCAAGCCAGTATAATTAATAAG | |
| | | GAACATTTAAGGGTGTGTAAGGGTGTGTGTGTGTGTAT | |
| | | GTGTGTGTGTGTGTGTGTGTAGCTCACTCTGCCTCTGC | |
| | | C | |
| D5S2052 | 168324273- | GATCACCAGGGAATCTAGATGGAATCCATAGTNCTNC | SEQ ID NO: 32 |
| | 168324633 | CCTGCAAGAATGCTGCAATTCTGTACCGTGGAGGNGC | |
| | | CAACAGAATCACCAGGCTCTGTGACTCAGTCACAACA | |
| | | CCCTGACCTGCCCCTGTCCATTCTCCATATCATACCCA | |
| | | GAGTGGTCTTTTCAAAGCACAGCTTTGACCAATTCTCT | |
| | | GTCTTTCACACATACACACACACACACACACACACAC | |
| | | ACATGCGTGCATGCATGCCTGAAATAGTATAGTATTGC | |
| | | TCTTAAGATAAACATTAANGTTCCTACCATGGTACAGA | |
| | | AAATATATGTNGTTAGGCCCCGTGGCTCTTTCTTTTCC | |
| | | AGACTCCTCTTACCCTTTTGTG | |
| DG5S879 | 168369069- | AAATCTTCCATTGCAGACCAATTAAAATTTAAAGATTT | SEQ ID NO: 33 |
| | 168369202 | TCTCTCTCTTTCCCCCTCTTCTCTCTCTCTCTCTCTCTCT | |
| | | CTCTCTCACACACACACACACACACACACACAACTCTC | |
| | | CAAGCACAAAGAGCTGA | |
| DG5S880 | CHR5: | TGAGTGGATGAGGGAGAAGGATAAAAGTCATAAAATG | SEQ ID NO: 34 |
| | 168376530- | CCTCGCAAAAACTTTGAGGTCTGCCTGCCTGGTATTAC | |
| | 168376775 | AGAGAAGCTTGCACAATACAGAATGTTTTGTGGGAAG | |
| | | GAAGGCAGGCAGGGAGGCAGGCAGGCAGGCAGGTTG | |
| | | GTTATGTTTTCACTCTTGATATCTCAAAGCTTTATGACA | |
| | | CACTCATGGAGTGAACATAATCTTTGTGGCATGATACA | |
| | | AAGGGACTGAATCACTCAAG | |
| D5S400 | 168378412- | AGCTATGATCATGCCACTGCACTCCAGCCTGGCTGATA | SEQ ID NO: 35 |
| | 168378696 | GAATGAGATTCTGACTCAGAAAAATATAAACACACAC | |
| | | ACACACACACACACACACACACACACACACACACACA | |
| | | CACAACTTTCTGTCTGCCCCCTTGCTCTTCCTGTCCCAT | |
| | | CTCTGCCTTTCTTCTTTCCTCTCTTTGTCAAATCTCCTTC | |
| | | GTCTGCCTCACAAAGGCCAGTGAGCCCCAGCCGCAGA | |
| | | CCAGGGAAGCCAGCAAATTAGGAATTTTCTTCACAAA | |
| | | GTTTTGAGTAGCT | |
| DG5S881 | 168395631- | TCTCCCATCTCCTCCCTAGCTATCCCCTGCCTGGTAATC | SEQ ID NO: 36 |
| | 168395815 | ACTGTTTTGTTCTCTATTTCTGTACAGTTGGGTTTTTGT | |
| | | TTGTTTGTTTGTTTTTAGATTCCACATATACTTGAAACA | |
| | | ATGCAATCTTTTTCTTTCTTTGTCTGGTTTATTTCACTT | |
| | | AACACAGTGCACTCCAGGCTCGTCTATG | |
| D5S2043 | 168499686- | CCAGAAAGCTTCACCAAGGGGCGAGCATGATTATGCA | SEQ ID NO: 37 |
| | 168499956 | TGAGCTTCTTAAATCTGGACTTCCCGACAGCTTCTCAT | |
| | | GACAGGTCTTCTGTGGAAGACTCCTTAGATTCAGACCA | |
| | | TCAGGCCTTTNAAAAGCACAGGAACCTACTTTACCTCG | |
| | | CCCAACTCTACGGATGGGATAGGNACTTACAAGGACA | |
| | | TTTCCTCATTGGATTCCAATGTTCATTCTCCCCTTCTCT | |
| | | CTCTCAATTAATCTCCCCCTCTTCTCTTTCTATCTACAC | |
| | | ACACACACACACACACACACACAGAGAGAGAGAGAG | |
| | | AGAGAGAGAGAGAGAGANAGAAACAGCTTCTTCACA | |
| | | GCGGGAAGCAGGGGAAGGGTATCTATTTCCGGCAAGA | |
| | | TC | |
| DG5S1058 | 168554788- | AAAGTCAGCTAGGGCGACTGAGCCAGAGAGATGGGGC | SEQ ID NO: 38 |
| | 168555167 | ACACAGCAAGAGGAGACCTGACAAAGTGCAGGTGTGT | |
| | | CCTAGAGAAGGCAAGCGAGACCACTGCATGATTGGAA | |
| | | TACCAGCCAACCCTTGCCTGTTCTTGTTCCAGCAAAGT | |
| | | GCCCTTTTAAAATAAATTTATGTATATAGTCTCTGTGT | |
| | | GTGTGTGTGTGTGTGTGTGTGTGTGTGTATAGACATAT | |
| | | AGAAATATATATTCCTAATTCAGAACTCATTCGTAAGT | |
| | | GCACACACTGACATGTGTTTCATGTTTCCCAATTTATC | |
| | | CCAGAGCCTATATGCAGTGTTTGGCTGCACAAGTAGG | |
| | | CATTAAATGCAACCACTGGGAATGAGAATGGTGGCCA | |
| | | CAAC | |
| D5S2075 | 168569742- | AGCTTTGAAATCCCATCCAAACTNATTGGCGTTTCAAA | SEQ ID NO: 39 |
| | 168570114 | CTGAATCCCAGATGTTCACTTACTGAGAAATAAATGA | |
| | | ATGGCCCAATTCGTGGACTGANGCAGGGNCCCTCACA | |
| | | AATAGATTCCAGGTGTGTTGGCCTCTGGACCACTATCT | |
| | | TTCTCTGTTTTACATACACATACATACACACACACACA | |
| | | CACACACACACACACACACACACACACACACGGCACC | |
| | | AAGTCCATCCTGAAAAGAATTCAACGTCATCTCCAAGT | |
| | | TAGAGCCAGTNTAGGATGAACAGAGGTAGTTACCTAA | |
| | | CACAAATAACATATTTTCAATTGTGGATGAAGGCAAA | |
| | | GGGCTCCACATTCACACTCTTGTGCCTTCAATA | |
| DG5S883 | 168592111- | GGCATGGGATGTTTGACCTAAGAGATGGACTAAAGCC | SEQ ID NO: 40 |
| | 168592265 | AATGAGTAAAAATGTAAAGCGTACTTAGTCAAATAAA | |
| | | TTCTTCTCTCTCTCTCTCTCTCTCTCTCTCTCCTTATTCA | |
| | | TCACTCTTGGGCCGTGATGATGATGAGGGAGAGGAGC | |
| | | AGT | |
| DG5S38 | 168715977- | TATTTGCCTGCCTGGGTTAGATGATTCTCCAGGCTTCT | SEQ ID NO: 41 |
| | 168716367 | ACACAATTTTATGTTTATATGAAAATAGCCACAAAGG | |
| | | GAAAAGAGGACAATAAAACAAGAGATATGAATAATA | |
| | | ATGTATTGTATACTTGAAATTTGCTAAAAGAGTAGATC | |
| | | TCAAGTGTTCTACATACACACACACACACACACACAC | |
| | | ACACAAAGGTAATGAATGAGATGATAGGTGTTAATTA | |
| | | ACTTGATTGTGGTAATCACTTCACAATGTATACATATA | |
| | | AAAACATCATTTTACAACCTACATTTATACAATTCC | |
| | | TCAATTATATATCAATAAACCTGGAAAAATAAAGATG | |
| | | TATAAAAAAGATTTACAAATAAGATTTTTAAAAAAGG | |
| | | ATTGTGAGGAAACAAAG | |
| DG5S37 | 168770226- | ACCAGCTAACCTGCCATGAGACTGTTGTGTAGCCATCT | SEQ ID NO: 42 |
| | 168770418 | TCACCTCCTCATCTTCAGGGAAGGGGATGAAAATATCT | |
| | | GTGCACTGCAAATGTTAACTATATATACACACACACAC | |
| | | ACACACACACACACGTACAGTAGGCCCTCCATAACCT | |
| | | GAGGTTCCACATCTGCATATTTTACCAACTCTGGTCCC | |
| | | TGC | |
| DG5S886 | 168803195- | TTGTTCCTGAATGGGAGGAGGACTGGTGAGTGAGGGG | SEQ ID NO: 43 |
| | 168803445 | GAAAGAATGGAGACAGGACTGAGAAGAACCAGAAAT | |
| | | TAAAATAATAGTAGTAATAGCCTAACATGTACACGTA | |
| | | TATGAGATCTATCTATCTATCTATCTATCTATCTATCTA | |
| | | TCTATCTATCTATCATCTATATATCTATCATCCATCATG | |
| | | TATCTATCTATTTGCATATATAAGCTATAATATCTGGC | |
| | | TCTGTTCTAATTGTTT | |
| DG5S101 | 168833451- | CCAGGCTTGGATGAGAGAATAATCTTAAGGAAGTCAG | SEQ ID NO: 44 |
| | 168833700 | CATATGTTCTAGAAACATTCAGAAGACAAAAGAGTCT | |
| | | GTTATGAAAGAACAAAGTATTTGTAATAATAAATTGA | |
| | | ATGTTACATGGACACACCCAGACATACACACACAGAC | |
| | | ACACACACACACAGTTTTTCTTCTCTCTCTCTCTCTCCC | |
| | | CACTCCCCTCTCTCATACTTTGCAAACAAGCTCCTCAG | |
| | | CAGCTGGTAAGCTGTTCCCTGTCC | |
| DG5S102 | 168895047- | TCGTGACTGCTCAAAGCTGAAGGTGTTGCCTTTTTCAA | SEQ ID NO: 45 |
| | 168895352 | ATGGGATGCAATAGCCTACTCATTTTCCAAGATTAAAG | |
| | | CTAGAGAGAAGAATGAATGAATGAATAAATAAATAAA | |
| | | TAAATAAATAAATAAATAAATAAATGAGCAAAGTTAA | |
| | | TATTAGCTGGAAAAAATAGGGTACAGGTGGAAGGAAT | |
| | | GAACCCATATTGAGAGTCCACTATGTGTCAAATTCCTT | |
| | | GCATGGAATCTCTAAGGTCTGTCTAGCTTAAAAGCAAT | |
| | | GCCAGCCTTGCTATCTGTACTTGATGAGGAGATGGATC | |
| | | GGAA | |
| DG5S39 | 168920224- | CCAAACTGCAAACCCAAACTTCTACAATGAATTCATGT | SEQ ID NO: 46 |
| | 168920577 | GCAACTTATTCTAAAAGATCTATACACACACACACAC | |
| | | ACACACACACACACACACACACACACACTTCCTGTCCT | |
| | | ATTGCTCTTCACTACTTCCTTCATCTCTGTGCTACAATC | |
| | | TGGGTTCATTTTTCTTCCCCTTGAGTAATTTATTATGTT | |
| | | TTTTACAGTGAGTCTGTTGCTCAAAAATTCTTTTAGTAT | |
| | | TTATTTGTATAAAAAGTCTTAATTTTGTCTTCATATAAA | |
| | | ATTTTGTTTGACACTCTATTATAAATTGACTGTTATTCT | |
| | | CTTTCCATGTTTTCCGGACATAGTTCCATTGTCTTCTGA | |
| | | CTTCCA | |
| D5S1456 | 168968063- | TTCNACCTTATGGGTATATCGAATTGTAACCCCGTTGT | SEQ ID NO: 47 |
| | 168968256 | AGGTCAAGGAGCATCTNCATATATACATACATAGATG | |
| | | ATAGATAGATAGATAGATAGATAGATAGATAGATAGA | |
| | | TAGATAGATTTAATTCTAAANTTTCCAAATACTCTTTC | |
| | | ATTTAAATGATTATAGTTTTACAACAATTTCATATATT | |
| | | NTATAGGTAGGAGAATTAGGGTTTTTCCAGAGAAATAG | |
| | | ANNCAATAGGCTGTGTGTGTATATAANGATTTANTTTN | |
| | | AAGA | |
| DG5S106 | 169021310- | GTTGGGCATGATGGTGTGTACCTATAGTCCTAGCTACC | SEQ ID NO: 48 |
| | 169021609 | TGGGAGGCTGAGGCAGGAGGATCCCTTGAGCCCAGGA | |
| | | GTTTAAGACTAACAAGACTCCATCTCTGAAAAATAAG | |
| | | GCAAAAAAAGTATGAAGAATAAAATAACAATCACTTA | |
| | | CATTCCAACCACCTATAATTAATCATTGCCAACACCTG | |
| | | AGGATATTTGCTTCCAATCTACAAGACTGCATTATTAT | |
| | | TATTATTATTATTATTATTATTATTATTATTATTATTATT | |
| | | ATTATTGAGATGGGGGTTTCTCTTTGTTGCCCAG | |
| DG5S40 | 169067041- | GCAGACAGGGTTCAAATTCCAGCCTCCCCTCATATTAG | SEQ ID NO: 49 |
| | 169067434 | CTGTGTGATCTTAGGCAAGTTTATTCATGTGTAAAAAG | |
| | | AAATAATAACCTCTTCTCGTGGGGTTGCAGGTTAAACA | |
| | | AAAGAGTAGGTATTAAAACAACTAAAAGAGTATGATT | |
| | | GGATTGTTTATAACACAAAGGATAAATGCTTGAGGAC | |
| | | ATGGATCCCCATCTTCCATGATGTGATTTTTATGCATT | |
| | | GTATGCCTCTATCAAAACATCTCATTTACTCCATATAT | |
| | | ATGTGTGTGTGTGTGTGTGTGTGTGTGTGTGTGTGTGT | |
| | | GTGTGTGTGTATGTGTATGCACACACTATGTGCCCACA | |
| | | AAAATTAAAAATTTTAAAATTAAAAAATTTTAAAAAT | |
| | | AAACATGCTGCTGGGC | |
| D5S504 | 169142805- | AGCTGCCAGCACACAAGGCCCAGAGGTACTTTATTGG | SEQ ID NO: 50 |
| | 169143006 | ATGCCAAATTCTTTTAACACACCATGAGAAAAGAAGT | |
| | | TGACAACTTTCCCATGCATTTTGGAAGGTGTGTTAGAA | |
| | | CGATTCAACACACACACACACACAGACACACACACAC | |
| | | ACACACACACACACATTTATTGGGTTGGGGGAGCCTT | |
| | | AAAACTTACAAATCT | |
| D5S1961 | 169173385- | AATTTCTTACCCTTTATCCCCGTCTTCTACTCCCATTCC | SEQ ID NO: 51 |
| | 169173631 | ACATGCCCCCCACCCCCCATGAATGATTTGTCTAATGC | |
| | | GTTGAATATGCACGTGTGGTTTTGGGTGCATGTATGTT | |
| | | TACACACACACACACAGACTCTCTCTCTCTCTCTCTCA | |
| | | CACACACACACACACACACACACACACACACACTCAT | |
| | | GCCTCTCCTTTGAAGAGGATCAGATATGGACAGCAAA | |
| | | GGGCATTAGCATCTTAGCT | |
| DG5S108 | 169203019- | GCTCCAAAGTTCCTGATTCCAAAGCCTAAGTTAAGCCA | SEQ ID NO: 52 |
| | 169203370 | TCTTAACTTATATTTCAGGTGACTAGTGGAATTTTTTAT | |
| | | GCCCAGTGTAGGTGGTAATGACGATGGAGATATGGCG | |
| | | ATGATGATGATGATGATGATGATGATGATGATGATGA | |
| | | TGGCAGTAGTGGTGGTGGTGTTGGTGATGGTGTTGAA | |
| | | GATCACCATGTCTGACCACTGTTGTCTGTGTCCTTTGT | |
| | | ACAATTGTTCAGATGCAGTGTCCTGGTTGTCACATAGA | |
| | | TGTCTCTGACTGTTTTACAGGCCTTCACCTACCACCAT | |
| | | ATCCAGGAGATCATGGTCCAGCTGCTGGGGACAGTGA | |
| | | ACCGGACAGTCA | |
| DG5S41 | 169277936- | TTAACCCACTGCTCCCATTTTGCTGGTGGAAAACTGAA | SEQ ID NO: 53 |
| | 169278300 | AACCAAAGAGATTAAGTCATTTACCCAAGGTCATGTA | |
| | | ACTAATATATTGAATCTCAGATGTTTTAATGATTTTGA | |
| | | CTCATTTCCAATTTGCCTGGCTATATAGAGAAAATATT | |
| | | TGAGGAATTGACAGGGAACACACACACACACACACAC | |
| | | ACACACACACACACACACACACACAGAGGGAGGGAG | |
| | | GGGAGAGAGAGAGACAGAGACAGACAGAGACTGAAC | |
| | | AGATTATTTCTCCACTGATGTTCATTATTTAGATCTATT | |
| | | TTCAACATTTAAAGGCAATTGTCAGCATAGTCAATTCA | |
| | | GCCATTTTAAACCATCAAGGGCCAATG | |
| DG5S42 | 169285983- | GCAACCTATTTGTTAGCAGCACATGCGTGCGTGTGCAT | SEQ ID NO: 54 |
| | 169286144 | GCACGTGGGCACACACACACACACACACACACACACA | |
| | | CTCTTTGCAGGGGAATTTTGAGCCAGAAATTTATCTGT | |
| | | AGGCCCATATTCATTCCTTTTTGCACATTTCTATTGTGA | |
| | | CCTTTGGGCA | |
| DG5S10 | 169356049- | CAATTCCACACAGCTGGAGAGTAACAAAGCCAGAAAT | SEQ ID NO: 55 |
| | 169356318 | CACATCCATTTGTGTGTGTGTGTGTGTGTGTGTGTGTC | |
| | | CAAATCCTGTGATTCCAGTGCCAGGATACACTGTCTTC | |
| | | CGTGTTCAACAGTCATGAAAGTATTTTAATGAACACCT | |
| | | GGCCCTGCAGTGCCTGATGTAGCAAATGCTGCAGATA | |
| | | CTCCACCCACCGACTCTTGGACCACCCAAAATCCACTG | |
| | | GCAGCTTCAGTGAGGCTTTCCTACTTCTTTCTTTCCCTG | |
| | | GGCT | |
| DG5S110 | 169391090- | CACTGGACTTGGAGTCAGGACATCATTTTAACAGGTTT | SEQ ID NO: 56 |
| | 169391341 | ATCGAGATGTAATTTACATGCCATACAATTTACCCAAA | |
| | | GTGTACAATCATTGACTCTTAGTATGTTCACAGAGCTA | |
| | | TGTAACCATCACCACAATCAATTTTACAACATTTTCAT | |
| | | TACTCCTAAAAAGCAAACCTGCACCCCTTAGCCACTGC | |
| | | TCTGCCAACACACACACACACACACACACACACACGC | |
| | | GTGCGCACACACACCCAAACACTC | |
| DG5S11 | 169409260- | CGCGTGTACCTCCACATAGATGTTTGCCAATGCCTATG | SEQ ID NO: 57 |
| | 169409401 | CCCAAGACACACACACATACACACACACACACACACA | |
| | | CAGGATACATTCAAGCACACACTAATGTATGTGCACTT | |
| | | GCCTGCACAGAGTCCACATCACACAGGC | |
| D5S1973 | 169424532- | AGCTTCTAGTCTGCTATGTTGCTAATTGTCTTCTTGGTC | SEQ ID NO: 58 |
| | 169424861 | ATCTTTTAAAACCATTTCTGTGAAATTATAGCCTCCTT | |
| | | ACTCCCTTACCCTGAGTCTGGATGTTTCTGAAGATGAC | |
| | | TGATCTCTACAGTGAGAAGGCCCTGGGAATTGACTGA | |
| | | CTCACTCTCTCTCTCTCTCTCTGTCTCTCTCTCACACAC | |
| | | ACACACACACACAGACACACACTCATATACATACACA | |
| | | CATAGATACACATATACATGCATCCACACATGCACAC | |
| | | CCTGGGCACACCCACACACCCTACAACTGCACATGCA | |
| | | TGCACACACATAATGTTAACTGAAGG | |
| D5S397 | 169542970- | AGCTTTTGGCTATGGAACCTTAGGCAAGATGTTCATAA | SEQ ID NO: 59 |
| | 169543287 | ACCCTTTAATCTCTAGTGCCCTTGTTCATAAAAAGAAG | |
| | | TGAATCGGATCCCTGCAGGACTGTTTTTGTATTCAGTG | |
| | | CACAGGTGTGTGTGAAGACACCCAGCATGTTGCCAGG | |
| | | CACACAGAGATGTCTACCTTGATACTTTTCTCTCCTCCT | |
| | | CCCCGCAAATACACACACACACACACACACACACACA | |
| | | CACACTCACACACTCTTATTTTGATCTTGGCCTGAGGC | |
| | | TGACAAGCCCCAGATTAGTGATCAGTGACAATTTTCGG | |
| | | CTTTATCAGCT | |
| DG5S115 | 169586308- | CGAGGATGCACACCTCATTAATTGAGGAGCTAGGATT | SEQ ID NO: 60 |
| | 169586550 | TAGATCCAGAGCCTCATGATTCTAAAGCCTGTTTTTTG | |
| | | TTTGTTTGTTTGTTTGTTTTGTTTTGGCCACACTAGGTT | |
| | | TCTAGAAACTTCCAGTTCCTTCTTAAAAGTCCTTTTTGG | |
| | | GCATTCCGGCCTAAATCCCAAAACTGTGGTCTGGGTAC | |
| | | AAGAGAGAATTAGGCCAGTGAGAAAAATTTAAACCAC | |
| | | CCTGCCCTCTAAAT | |
| DG5S888 | 169653226- | CTTGATGTCTTCTTTCACCATCCCCTGGCACCCCCCTAT | SEQ ID NO: 61 |
| | 169653848 | ACATTTATTACTTGAAACAGACTGACCTTTATTTGGTT | |
| | | AGGCCACTGTGGTCAGGTTTCTGCAACATGGGGTCAC | |
| | | ATGCCTTCCCAACTGACACAAGTCTCAAGCTCCTTTTC | |
| | | TCTTCTTTTTATAACTTCTAGAAGCATAGCTTCTACCAG | |
| | | ATAAGGATCTAACCTTTTCAGTGGAAAACAAAAATGG | |
| | | CAAAGAAGTAAAGAAAGAAGAGAGAGAAAGAAGAAA | |
| | | GAAAGAAAGAAAAGAAAGAAAGAAAGAAAGAAAGA | |
| | | AAGAAAGAAAGAAAGAAAGAAAGAGAGAAAGAAAG | |
| | | AGAGAAAGAAAGAGAGAAAGAAAGAGAGATGGAGAG | |
| | | AGGGAAGGAAGGAAGAAAAGAAAGAGAGGGAGAAG | |
| | | AAAGAAGACAGGGAAGGAAAGGGAAGGGAAAAGAG | |
| | | GGAAGGGGAGAGGGGAGGACAAGGGAAGGGGAGAG | |
| | | GGGAGGACAAGGGAAGGGAGGAAGGAAGAAAGGAA | |
| | | GGAAAGAAGGCAGGAAGGAAGGAAGGAAGGAAGGA | |
| | | AGAAAGGAAGGAAGGAAGGAAGGAAAAATAACTAGG | |
| | | GGCTTTCACTTTTGCCTTCAATAGCAGAGTGGCCCTGG | |
| | | ATAT | |
| DG5S44 | 169661202- | TATTGGCAGAGGGTGAGTCCAGTGTATAAAAGCAACT | SEQ ID NO: 62 |
| | 169661574 | ATATTTGTGCAATAAGGCAACCTCTAAACACAAGTTAC | |
| | | TACTTCATCTAATGCCACACACACACACACACACACAC | |
| | | ACACACACACACGAGTCATCTGTTCCAAGGCTGTTGCC | |
| | | TTTACTAAGTGATGCTATGTTGGTCCTTGAGGTGGTGC | |
| | | CTTCCTGAGGGTTTTCAAGCATAGCTTTGGCCATGCAC | |
| | | AGTTTTCTTCTTATACACACTCTGAGGAGCCCCGCCGT | |
| | | CACGGTAATGCACCTGCCTCACAAGCTGGTGGGCAGC | |
| | | TTAAATGAAATACACATTTTGCTCCAGGCCCAGCACTA | |
| | | GCTCATCAATGTGAGCTGGTGTTAGCCTCACC | |
| DG5S45 | 169693772- | CAGTAGCCAGGAAGCTGAGGAACACACACACACACAC | SEQ ID NO: 63 |
| | 169693912 | ACACACACACACACACACACACAAACACACCCCTTCC | |
| | | TGGCTCCAGTTCCGCACCACCCCACACCCCCAACACCG | |
| | | GAAGTAGATTTCTCAATAGGCAGGGCTG | |
| DG5S46 | 169702377- | TTTGCCAGAATGTCCTCACACCAAATAGTGGACCCCTT | SEQ ID NO: 64 |
| | 169702678 | CTTTTGCTGATTTATCTGCTATTGTATAGGTGTATGTGT | |
| | | GTGTGGGTGTGTGTGTGTGTGTGTGTGTTAAGGCAGGT | |
| | | GGTAGTATGTGTAGGGTAGGGTTTCCCCAGTCACCTGG | |
| | | AGCCCTGAGTGCCTGCTTCCCTAAACTAGGGCAGTTTA | |
| | | GCTGACTGGCTTCCTTTGTGTATTGGTCCATTCTGCATC | |
| | | AAAAGCATGTGAATTTTCATTCAATCTCTCTTCTGAAT | |
| | | TTTCACTTTTAAAAACCTGACCAGTCCCTTGTG | |
| DG5S47 | 169788696- | CTCCTCCATGGTAGGGACTGGTTCTCTTAGGCCCGTGT | SEQ ID NO: 65 |
| | 169788899 | ATCCTCAGGCCCAGCATGCTTGGGAAAATGTTTGCTAA | |
| | | TGCTTTGTGACTCAAAAGGAATCACACACACACACAC | |
| | | ACACACACACAAACACACACACACAGTTTTTAATATT | |
| | | ATCAGTCATATCAGCCCCCTGAGGCAGCTGCTCTGTTC | |
| | | CAGACAAACCCTGTT | |
| DG5S119 | 169843903- | GGGTACAGGAGAGTTGTGGTGGGCATTAGTACTACTC | SEQ ID NO: 66 |
| | 169844041 | CTGCTGCTGCTGCTGCTGCTGCTGCTGTGTCCACTGTT | |
| | | AGTGACAGAAGTGGGAAAATATTTAGTTGAGTTCAC | |
| | | ATTAGTGTTCCCAGTTTAGCGTGAGC | |
| DG5S953 | 169866165- | CCATGAGTTCAGGCAGTGGGTTAAATAAGATTTCCCTT | SEQ ID NO: 67 |
| | 169866415 | GAAGTCGAATGAAATCACAATGCACCACACACAGGGA | |
| | | CACACACACACACACACGCACGCACGCACATCACACA | |
| | | CACACACACACACACACACACACACACACACACATAC | |
| | | ACACACACAGTCTCCCTGGGGCCAATCTACTGCCCCCT | |
| | | GAACCTCACCCATCAGCCAGGTGCCTGGCCCCGGGTCT | |
| | | GTCTCTTAGGGTTACATGCTCCCGG | |
| DG5S955 | 169951970- | ACTTATGGAACACCTACTCAGTGCCAGGTATTGTTGTA | SEQ ID NO: 68 |
| | 169952619 | GATGCCAGGAGTACAGCAGGGAATAAAACAACATCCC | |
| | | TGTCCTCGACACAAACACACAAGTAAATAGAGAAGGT | |
| | | CAGAGATAAATGCTGTGCAGGAAAACAAAGCAAAGTG | |
| | | AGGGATGGAGAGTGCGGAAGGTTGGGGCACTTTTGTT | |
| | | TCAGATGAGTGTCAGGGAAGCCCCCTTGGAGGAGGCA | |
| | | CTGTAAGGGCACAGAATCGAATGAAAGGAGTATGTGA | |
| | | AGGTGCTTAAATTGTTTCTGTTTGGTTTGGTGTGGTGT | |
| | | GATGTGGTGTGGTGTGGTGTGGTGTGGTGTGGTGTGGT | |
| | | GTGGTGTGGTGTGGTGTGGTGTGGTGTGATGTGATGTG | |
| | | GTGTGCGGTGCGGTGCGGTGCGGTGCGGTGCGGTGTG | |
| | | GTGTGGTATGGGTTGAGGCTGGCCTTAGGAGCCTGTTG | |
| | | GCCTTCCAGGCCAGTCCTGAAGCCCAGCCCAGAGCAC | |
| | | CAGACTCTGCAGTCAGTCAGTGGAGGGCCCACATCTC | |
| | | AGCCAATGCATGGCTTTGGGTGGTGACTTCATCTCCCC | |
| | | TAGTGTTCCTTTCCCCCTCTGCAAAATGGGAATGGGGA | |
| | | TGGCTCAGAACTCCCAGCGGGAGTTAGGAGGAATAAT | |
| | | GTATAGGAAGTATGAGCAGAGTGCCTGG | |
| DG5S13 | 169961410- | TGATGTGCTCGTTCCCATAGCCCCGCTGTGTGTGTGTG | SEQ ID NO: 69 |
| | 169961530 | CGCGTGTGTGTGTGTGTGTGTGTGTGTGTGTGTGTGTG | |
| | | TGTTTGGTGGGGTGGGAGGGGAGGCAGAAGAGGAAG | |
| | | AGAGGGCA | |
| DG5S123 | 170015858- | TGGTGATCAGCTCAGTGTCCTTGGAAAAGAGCAGAAA | SEQ ID NO: 70 |
| | 170015997 | GTGGTATCACGAACATATCTTCTCCTTTGCTTCCTTCTC | |
| | | CTCACTCTTCATCATCATCATCATCATCATCATCAAAT | |
| | | ATGGATCTGTGAGGCTACCTCTGGG | |
| DG5S124 | 170041996- | GGAGGAGAGACCAGCATTCACATTCAGTTATTGTTGTT | SEQ ID NO: 71 |
| | 170042336 | TTAAATCCATTACGCACATACATAGGAGAAAATTTCA | |
| | | GCAACAGTCACCCTCTGAACCCAGTTCCTCAGTTCTCT | |
| | | CCAGAGGCAACTAAAATGCTCAATTATTAGTGTATCCT | |
| | | TTTGGAAATATTTTATGTATATGACAGTGTGTGTGTGT | |
| | | GTGTGTGTGTGTGTGTGTGTGTGTTCCTTTCCAATATTA | |
| | | AAATAATATTAACATTGGTAATAGTGGTACTAAACAA | |
| | | CTTAGGGTGTTTTTTTTTTCATTTAATAGTATATTTTTA | |
| | | GTATCTTTCCAGGAAAAGATACATGGATGTGCCACA | |
| D5S625 | 170105556- | TCAATAAATGATTCTGGGGATGTGTCTGTCTGTCCATC | SEQ ID NO: 72 |
| | 170105787 | TGTCTCTCTCNAGANACANATACACACACACACACAC | |
| | | ACACAGACACACACACACATCCTGTTAGTTCTGTTTAC | |
| | | CTGGAGAACCTTGACTAACATACCCATTAAAACCAAA | |
| | | ATATGTCCTTCAGGGTGTTAATGTTTGGTTGAAGAAAC | |
| | | ACAGAAGTTTAACAATTGTATCAGGCTGGGCACGGCC | |
| | | TATAATCCCAGCATTTTGGGAGGGCACAATGAGNGGA | |
| | | TCACTTGAGCCCAGGAGTTCTAGACCAGCCTATGCAAC | |
| | | ATAGTGAGACAAAAAAATGAANAAAATTAGGGGTGTG | |
| | | GTGGAGCGCACCTGTAGTCCTAGCT | |
| DG5S959 | 170167429- | GAGTTCTATGGAACAGCATTTATTGAATAATAACATTT | SEQ ID NO: 73 |
| | 170167616 | CAGGAAAAAATATAAGCTTTACTGTATATTAAAATAC | |
| | | ATATATACGTTTATATATTATATATTATATTATATTATA | |
| | | TATTATATATATTATATATATTATAATATTTATATATTA | |
| | | TATAGATATAAATCAACTACAAGATCCAGTTCAA | |
| DG5S960 | 170203240- | TTGCCTAAGATCTAGGTGTTCAAAAGAATTTCTCCAAT | SEQ ID NO: 74 |
| | 170203459 | CCACTTCAGCCTGTTATTATGTATGTATTCTGTTTAAA | |
| | | TGAGAAACAAGAGTCATTTTCTCCAGAATAATAGAAC | |
| | | CATAGTGACACTTGAAGTAAGTCCAGTGGTCCTGATAT | |
| | | GATAATAATAATAATAATAATTATTATTATTATTATTA | |
| | | TTATTTTGAGACGAGGTCTGTATCTGTTG | |
| DG5S16 | 170280782- | ATGGAGAGACACGGAGTTGCTTGAGGGTACAGTGCCT | SEQ ID NO: 75 |
| | 170281084 | GTAGATACTCAATAAATATTTGTTTAATTAAGAAAATT | |
| | | TCTGTTATTTGTGTGCTCATACATACCATTTCAGTCTGG | |
| | | TGAGTATTGTTCTTTCCTAGAGTTTACTTTTAATCTTAA | |
| | | GTATTTTCCAGGTCCTTTGTTGACTTCTCTTTAAACCAC | |
| | | AGTACACACACACACACACACACACACAACTTTTGTG | |
| | | TACTATAATAGCTTCCCCAAAATTATAATTTAGTCATT | |
| | | GTGATGCAGATCTTCTTCCAAGGCCTCTACTTTGG | |
| DG5S962 | 170338421- | AAACAAACAAACAGAAACACCAAAATGGATTCGCGCA | SEQ ID NO: 76 |
| | 170338789 | TCTTATAAGTGCTTTCTCTTATGATCGAGAGTAAGACA | |
| | | AGCATGGCTACTCCCTTCTCTTCTATTAAATATTGTACT | |
| | | AGGGGTTCTATTGAGATAAATAGGCAAAAAACAAAAC | |
| | | AAAACAAAACAAAAAGGCATCCAGATTTAAAAAAAA | |
| | | AAGGAATCTAGGAATAAAGGGATTACATCTCTACTTG | |
| | | CAGATGACATGATCTTATGTATAGGAAATCCTAAGGA | |
| | | TCCACTGAAAAACTGTTAGAACTAATAACATCAGTAA | |
| | | GTTTGCAGGATTATAAGATTAATACAAAAACTCGACT | |
| | | GAATTTCTGTGCACTTGCAATAAACAACCCAAA | |
| DG5S132 | 170442700- | TCTGCCCACACACTTTATGCTTTAAAACAAAAGGCCAT | SEQ ID NO: 77 |
| | 170442947 | GTTGAACTTGTAGAACCAAATGATTGCTAATTACTTGG | |
| | | GGCGATACTAGTGATATATTATCTTACATACACACACA | |
| | | CAAAACACACACACACACACACACACACACACACACG | |
| | | GCTTGAGTCCAGCATGGCCTACTGATTTTAAAATAGGA | |
| | | AATGACAGTGTAAATGCCAGGATAAAGGACAAAGTGC | |
| | | TCTGACCTGTTGCCAAACCTT | |
| DG5S136 | 170469573- | GGGTTTAGGACCCACGTATCTTTTGTTTGTTTGTTGTTG | SEQ ID NO: 78 |
| | 170469843 | TTGTTGTTGTTTTGGAGTTCAACATGTTTATGGTGTGTA | |
| | | GCCATGGTTGAAAGCTTTTATTTTATAAGATAGACAAA | |
| | | GCAGGAATTATTATTCTCATTTTACAGGAGAAAAACA | |
| | | GAAGGGCTATGTGGTTTGTTAAAAGGCCACACAGACA | |
| | | GTAAAGAACACAGCCTTTACATGGTCAGCCTCACATTC | |
| | | TAGTACTCATTTTATTACACTGCTCTTCTTCTCTGTTGC | |
| | | CTG | |
| DG5S133 | 170480360- | CTGGCCTCTTTGCCCATTTTCTAATTGGATTATATGTGG | SEQ ID NO: 79 |
| | 170480621 | GGTTTTGTTGTTGTTGTTGTTGTTGTTGTTGTTGTTGTTT | |
| | | TGCTGTTGTGACGTTAGAGTTCCTTGTATATTCTAGAT | |
| | | ATTAATCCCTTGCCAATTAATAGTTTGCCAGTATTTTCT | |
| | | CCCATCCTGTAGGTTGTTCACTCTGATGATTGTTTCCTT | |
| | | TGCTGTGCAGAAGGTATTTAATTTGATATAATCCCATT | |
| | | TATTTACTTTTGTTTCTGTTGCCTGTGA | |
| DG5S17 | 170499980- | CCATCCAGGGTCTAACTCCAGCATTTGTATAAACTTGG | SEQ ID NO: 80 |
| | 170500284 | ACAATACTTTTGCTACAGGGTTGTCATTGAAAGTATTG | |
| | | CCTCATTATATTTCTTAGTGGTCCCTGTATGAAGCCAT | |
| | | ATAAGAGAAACTTCTTAATTTAGCACTAGGAAATGCTT | |
| | | CTGTTGACTTGAGATGTGTGTGTGTGTGTGTGTGTGTG | |
| | | TGTGTGTGTCTGTGTGTGTGTGTGTGTGTCTGTGTGTGT | |
| | | GTGTATTCCCCTAATTGATAAACTATAAAATAATCTTT | |
| | | CTCTTTTCACTTTGGCCATCTGGAAATTTGCCACCAA | |
| DG5S137 | 170644993- | TGGCTTCCCAATCCTAGAAAAGGAAGAAAGCTGCATG | SEQ ID NO: 81 |
| | 170645364 | TTGTTGTTGTTGTTGTTGTTGTTGTTGTTGTTGTTGTTGT | |
| | | TGTTAGATGGAGTTTTCTGTCGCCCAGGCTGGAGTGCA | |
| | | GTCACATGATCTCAGCTCACTGCAGCCTCTGCCTCCCT | |
| | | GGTTCAAGCAATTCTCCAGTCTCAGCCTCCCAAGTAGC | |
| | | TGGGATTACAGGTGCGCACCACCACTCCAGGCTAATTT | |
| | | TTTGTATTTTTAGTAGAGACGGGGTTTCACGATGTTGG | |
| | | CCAGGCTGGTCTTGAACTCCTGACCTCAGGTGACCCAC | |
| | | CTGCCTCGGCCTCCCAAAGTGCTGGGATTACAGGCGTG | |
| | | AGCCACCGCACCTGGCTGAAAGCTGCAT | |
| DG5S53 | 170673106- | GCCTTCGCAGATTGTACCTCTTCCTTTCACCCTTCTCGC | SEQ ID NO: 82 |
| | 170673364 | TGGCCTGTGCTTCTCTCTCCATCGTGGTCTCCCACGCCT | |
| | | TGGTTTCTCCTCCATCCCCATCCCCATCTTTCGTGAGCC | |
| | | CCTCCAACTCTCTCCCCGTGTTTTGTACGGTCTCCTGCG | |
| | | TTCACTTGATTTCCTCTCACCCACCCCCCCCCCAAACA | |
| | | CACAGGCACACACACACACACACACACGCGCACACAC | |
| | | ACGGGCCTCTCGCACTCTCCTTCTCCT | |
| DG5S968 | 170675807- | TGACTCTTGGCCTCTGTGTGTCTCTGGGTTTCTTTGTCT | SEQ ID NO: 83 |
| | 170676033 | CCCTCCTCTCCACGGTCCTCTTGTCCTTTTGTCTTCCCT | |
| | | TTCTTGTTTCTTGAATCTCTTTGCCTTTATGTATCTGTCT | |
| | | TTCTCTCTCTCTCTCTCTCTCTCTCTCTCTCTCTCTCTCT | |
| | | TCTTTCCTTTCTCCCTGACTCCCTCTCTCCCTCTTCCAG | |
| | | GCCCAGCTCCCAGTAGCTCCTAAGGCAAA | |
| DG5S904 | 170735417- | CATTTGGGATAAATGTTGTCTTTAGTTTTCAACTACTTT | SEQ ID NO: 84 |
| | 170735632 | TTCTTTGGCTTATTCTCTCTCTCTCCCTCCCTCCCTCTCT | |
| | | CTCTCTCTCTCTCTCTCTGTGTGTGTGTGTGTGTGTGTG | |
| | | TGTGTATTCATGTTTTCTTAATCTATCTGAATTGTTGTG | |
| | | TCGGTTTTCCATGCGAATTTCCAGTTACCTCCACAGTA | |
| | | TTCGTTTCAGAATGCTTCCT | |
| DG5S906 | 170820130- | TTGCAGTTTCATGAACCAAGTATTACTGCCTCAACAAT | SEQ ID NO: 85 |
| | 170820505 | TAAAAACAACAGACAAATTATTTAAAAAACCATGAGG | |
| | | CGAGTGGTGGCTGGTGGCTGGTGGCAGGGCGGGGGCA | |
| | | GGGTGGCCTCTGTGTCTCATGCTTTCTGGTTGGTCTGT | |
| | | GGTCTTTGCACTGAGAGCTAGGGCCTTGCACATTCATT | |
| | | CATTCATTCATTCATTCATTCATTCTTTGAATTCAACAT | |
| | | TACTATGCACCAGGCGCTGAGAAGGCAGCCTTAGACA | |
| | | GATGGAAATCCTTGCTTTCCGGGAGATTCCATTCTAAT | |
| | | GGGTCATTGATTCAGTGGCCTCTTCAGTCATTTGTTCA | |
| | | TATGCATTTACTCGTACCTCTCATGTGCCA | |
| DG5S141 | 170910447- | AACTGAACCTGGGCTGTGTCAGTCTAAGACTTATGCTT | SEQ ID NO: 86 |
| | 170910786 | GGAACCTGTAAGAAGAACAAGTGTGCGTGCATGCATG | |
| | | TGTGTGTGTGTGTGTGTGTGTGTTTGGAGGGATAGTGA | |
| | | AGTTTTTTCCTACAGCTACAAATAGAACATGCTTTCCT | |
| | | ATACAATTGTACTAATCAATATTATTTCCTTACATTATC | |
| | | TCCAGCCATTTCCCTATAATTAGACATTCAGATTATTT | |
| | | CAAGGTTGTTATTCCTATAAACAGTGATGTGATGAATT | |
| | | TTTTAAAGTTGGTTCCTCACATCCGTCTGTTCTTGTAAA | |
| | | TGTATCCATCATAGAACTGGACCACAAAGGTTGG | |
| DG5S909 | 170941109- | GGGAGTTCTCTTTCTTCAAGTGCTTAGGGGAGAAAATA | SEQ ID NO: 87 |
| | 170941259 | AGTGAGAAAAAGAGAGATAGAGGAAGGAAGGAAGGA | |
| | | AGGAAGGAAGGAAGGAAGGAAGGAAGGAAGGAAGA | |
| | | AGAAGAAAAGGAAAGGAAAAGGAAAGGAAAGGAAG | |
| | | AAAGGA | |
| DG5S910 | 170946679- | TCCATGTTATTCTCTACCTGTTGGTTCCTTCCTCATTGA | SEQ ID NO: 88 |
| | 170947010 | AAATTGGTGTATAGATGGTAGATAGATAGATGATAGA | |
| | | TAGATAGGTAGATAGATAGATAGATAGATAGATAGAT | |
| | | AGATAGATAGATAGATAGATAGATTTTTATTTTTGGTC | |
| | | TATCTCCTTTACTAAACAGTAAGCTCCATGAAAATATG | |
| | | GATCATCAGTGTCTTATTCACCATTATATTCTCAGCAT | |
| | | ATGGTATTGTCCTGGTATAGAATAGATTCTCAATAAAT | |
| | | GCTTGCTAAATGAATGCATTCATGAGTGAGTGAATGA | |
| | | ATGAATATGCGAGTGGATGAGTGTGTGGA | |
| DG5S911 | 170985696- | TGCTTGAGGGCAGGATCTATATGTAATTCCTTTCTGGA | SEQ ID NO: 89 |
| | 170986066 | AAACCAGGGATTGAAACAGGATCTGGCATGCAATGGG | |
| | | CTGGATGGGTGAATGGAGAAATAGATGAATGACAGAT | |
| | | GGATGGACAAACAGATGGAAGGAAGGATGGATGGAT | |
| | | AGATGGATGGATGGATGGTTGGATGGATGGATGGATG | |
| | | GATGGATGGATGGATGGATGGATGGATGGATGGACAG | |
| | | ATGGATTGGTTGGTAGATGTGTGGATAGATGGATGGG | |
| | | TGAACAAGCGAGTAGATGGATGAGTAAATGGCTAAAT | |
| | | CTGGTGCTTTTCTTCCAGAATCCTGGATTCTGAAGGGA | |
| | | GGCTTTGCAGCCCTTCCTCGTGGATCACTTGCTCTG | |
| DG5S143 | 171018986- | GGCTGAATTACTGGGCATGTTTCTGAGAAGAAAGAAC | SEQ ID NO: 90 |
| | 171019237 | TTCTATTTTAATTATATATCTACAGAAACCAAATTGCC | |
| | | TGCTTACAGTTTTACATGTCTGATGATTGGAAGTTTTT | |
| | | GTTTGTTTGTTTGTTTGTTTGTTTGTTTCCACAGACTAG | |
| | | CCTCTGACTCCATATATTTCAAACTTTGTTCCTCTTCCA | |
| | | CTACCCACATATTTCTGATGTGAGACATTCTAGAAAAA | |
| | | TTTCATATTGCAAGACGGCTTC | |
| DG5S513 | 171039003- | TTGGCAGGATTCAGTTCCTCATGGGCACCAGACGGAG | SEQ ID NO: 91 |
| | 171039366 | AGTCTCAGCAAATCACTAGCTGGTGACTGCAGCCACC | |
| | | GCAGTTCTTTATCAGGTGGTTCTCTCCATAGGGCAGTT | |
| | | CACAGTGTGGTAACTTGCTTCATCAGAGCAAGCCAGG | |
| | | AAGAAGACCCAGAGACAGACAGAGAGAGAGAGAGAG | |
| | | AGAGAGAGAGAGAGGAGGCCTCTGAAAGAGAGAGAG | |
| | | AAGAGAGAGAGGCAAAGAGAGAATGAGAACTCCAGA | |
| | | AGTCACTGTCTTTTATAGCCTAATCTTGAAAGTGACAT | |
| | | TCATCACTTTCACTACATTTTCTTCCCCAGCAGTGCTCA | |
| | | GTGGGAGGGGATTATACACGGCCATGGAT | |
| DG5S145 | 171040948- | GCACATTTGCAGAGGTTTGAGGTCCCATCATTAGCCAT | SEQ ID NO: 92 |
| | 171041151 | GCTTCTTGGTTCCTGCACTATGAGTATACGTATGTGGG | |
| | | CTGATGGCCTCATTCACTGGATACACACACACACACAC | |
| | | ACACACACACACACACACACACACACCTCACCAGGGA | |
| | | CTTGGGAGTATCTAAATGTTTTGAGAATCATAGAGCAG | |
| | | GGAGACATCCAACAC | |
| DG5S146 | 171073796- | GGGCACATACAGCTTTCCTTGCAGGAAAAAAACCTGC | SEQ ID NO: 93 |
| | 171074122 | TTAACTTTGTTATTATATATTATTTGATCTGTGCTTCA | |
| | | TATATTATTCATATATTATTTGATCAAGTTGCTTCATGT | |
| | | ATTATTTGATCAAGGAATCATGTGTGTCTACAGCACCT | |
| | | ATTAAAATTCCCTGGCACTGAAATTCTGTAGAAAACCA | |
| | | TTTAGGAAAAGTTGATCTAACTGTATAATTATTAGTAA | |
| | | AACATATACACACACACATACACACACACACACACAC | |
| | | ACACACACAGACCACAAGCAAACAAAAAAAAACCAC | |
| | | CTTAATGGTCTCCTAACCAAGGCA | |
| DG5S147 | 171107565- | GCATGTTCGCCACAGAGATTCAATTAATTTAAATAGGT | SEQ ID NO: 94 |
| | 171107831 | AGAGGACTTGGGGCAGTGCCTAGGACAACATTACACT | |
| | | CAGGGATGGTGATGATGATGATTATAATGATGATGAT | |
| | | GATGTTGATGATGATGATGTTGATAATGATGATGATGA | |
| | | TGATGATGATGATGATCATGATGATAATGGAAAAGAA | |
| | | GATAGAGGAGGTAGAAGAGGAGACAATCATGATGTTG | |
| | | GAGGTAGACTCCAATCTTCAGAATCAGAAGCTCAGGG | |
| | | TTGGA | |
| D5S462 | 171134297- | AGCTTAATCTATTATTTNAGAGGCAGAAAGTTAACTTG | SEQ ID NO: 95 |
| | 171134396 | CTTATCCTGAAAAGAAGTGCAAATATATCCCAAAAGT | |
| | | GCCATTCTTTCATTCATCCACTCAAACAGATACACACA | |
| | | CACACACATACACACACACACACACACACACCCTTTTC | |
| | | ACCCCTTGGTAGTGTACAGTCTCTGAGTTGTAAAAAAT | |
| | | AGTCATTNCTTTCTGCTTGAAAGACTGTATTAGCT | |
| DG5S148 | 171140975- | CCAGCATGATCCTATGAATCCTTATAAAAGGGAGATG | SEQ ID NO: 96 |
| | 171141303 | GGAAAATTCACACACAGACAGACACACACACACACA | |
| | | CACACACACACACACACAGATAGAGACAGAGAGAAG | |
| | | AGGATAAGGCAATGTAACCATGGAGGCAGAGATGGG | |
| | | AGTGCTGTAGCCACAAGCTAAGGAATGCTGGCAGCCA | |
| | | CAGATGCTGGAAGAGTTGAAGAATGGGTTCCCCCTGA | |
| | | GGGAGCACAGCCAGATGCATGCTTTGAGAGTTCAGCC | |
| | | CAGTGCTACTGACTTTAGACTTATGGTTTCCAGAACTA | |
| | | CAAAAAATTAATTTCTGTCGTTTCAAACCATCC | |
| DG5S914 | 171219902- | CAAACGTCGCTGACCTGAGTCTGACCTGGGCTGCCTCG | SEQ ID NO: 97 |
| | 171220159 | TGTTACCAACATGAAAAGGGAGTGAGAAAATCTGAGG | |
| | | CCAATTAACTTCTCTCCCTCTCTCTCTCTTTTTCTCCGCT | |
| | | TGCCCACCTCTCTCTCTCTCTCTCTCTCTCTCTCTCTCTC | |
| | | TCTCTCTCTCTCTTTTTTCCCCCTCCTCTTCTTGGAGAC | |
| | | ATGATGAAATTTCCTGAAACAAAAACTCGCAGCCCCGT | |
| | | TCAATAAAATGCTTTCGCCTTTGGTG | |
| DG5S150 | 171232854- | ACAGTTGCCATTTGCTCATTTAAAATGTAGTGAGGTGT | SEQ ID NO: 98 |
| | 171233077 | TTTAAAGAGGGTTTGTTCAATTTACCAAAAAGGGAAA | |
| | | AAAAGGGAAAAGAAGAAACTTATTGTTGAACGAACAC | |
| | | ACACACACACACACACACACAAAGAGCCTGGCTTAAT | |
| | | TTAGGGATAAAGCAAAGAAGTCAATACCCCCACATCA | |
| | | ACTATTGAAACCTAAGCTATTGCTGGAGTTGACAGCG | |
| D5S429 | 171276128- | AGCTCTNCCTAGCATTGTTTTCCTTTGCTTCATTTCCTC | SEQ ID NO: 99 |
| | 171276490 | TTAAATGTGTTGGATGCACTTNGTTCCTGCTAACTAAT | |
| | | CTATCTTTNCAGTTTCAAATCAAATGAACCCAGAGAAT | |
| | | TTATTTTTACATTATTATCTTCAGATTTAGATTTGTTTT | |
| | | GCTTTTAATCCTGTCTTCATGAAGGGGAAAGCCATGTG | |
| | | TACCAGCATGGTTGATAAACCACCAAATCGTGAAACT | |
| | | TTGCTTGCTCCCCAAACCCCCAACCACACACACATACA | |
| | | CACACACACACACACATACACACACACACACACACAC | |
| | | ACACACACACACACACACAACCTGGGAAATTGGGNAG | |
| | | AAAACTGGCAAACCTTAAACTAG | |

[0278] TABLE 7

The DNA sequence of the microsatellites employed for the association
studies across KChIP1 (including Build 33 locations).

| | | | |
|---|---|---|---|
| NAME | POSITION | SEQUENCE | SEQ ID NO |

| | | | |
|---|---|---|---|
| DG5S1173 | 169653708- | AAGGGAAGGGAGGAAGGAAGAAAGGAAGGAAAG | SEQ ID NO: 100 |
| | 169653840 | AAGGCAGGAAGGAAGGAAGGAAGGAAGGAAGAA | |
| | | AGGAAGGAAGGAAGGAAGGAAAAATAAGTAGGG | |
| | | CCTTTCACTTTTGCCTTCAATAGCAGAGTGGCC | |
| DG5S44 | 169661202- | TATTGGCAGAGGGTGAGTCCAGTGTATAAAAGCAA | SEQ ID NO: 101 |
| | 169661574 | CTATATTTGTGCAATAAGGCAACCTCTAAACACAA | |
| | | GTTTACTACTTCATCTAATGCCACACACACACACAC | |
| | | ACACACACACACACACACACGAGTCATCTGTTCCA | |
| | | AGGCTGTTGCCTTTACTAAGTGATGCTATGTTGGTC | |
| | | CTTGAGGTGGTGCCTTCCTGAGGGTTTTCAAGCAT | |
| | | AGCTTTGGCCATGCACAGTTTTCTTCTTATACACAC | |
| | | TCTGAGGAGCCCCGCCGTCACGGTAATGCACCTGC | |
| | | CTCACAAGCTGGTGGGCAGGTTAAATGAAATACAC | |
| | | ATTTTGCTCCAGGCCCAGCACTAGCTCATCAATGT | |
| | | GAGCTGGTGTTAGGCTCACC | |
| DG5S45 | 169693772- | CAGTAGCCAGGAAGCTGAGGAACACACACACACA | SEQ ID NO: 102 |
| | 169693912 | CACACACACACACACACACACACACAAACACACC | |
| | | CCTTCCTGGCTCCAGTTCCGCACCACCCCACACCCC | |
| | | CAACACCGGAAGTAGATTTCTCAATAGGCAGGGCT | |
| | | G | |
| DG5S46 | 169702377- | TTTGCCAGAATGTCCTCACACCAAATAGTGGACCC | SEQ ID NO: 103 |
| | 169702678 | CTTCTTTTGCTGATTTATCTGCTATTGTATAGGTGT | |
| | | ATGTGTGTGTGGGTGTGTGTGTGTGTGTGTGTGTTA | |
| | | AGGCAGGTGGTAGTATGTGTAGGGTAGGGTTTCCC | |
| | | CAGTCACCTGGAGCCCTGAGTCCCTGCTTCCCTAA | |
| | | ACTAGGCCAGTTTAGCTGACTGGCTTCCTTTGTGTA | |
| | | TTGGTCCATTCTGCATCAAAAGCATCTGAATTTTCA | |
| | | TTCAATCTCTCTTCTGAATTTTCACTTTTAAAAACC | |
| | | TGACCAGTCCCTTGTG | |
| DG5S1178 | 169745438- | GTGCTCAATGGCTGTTGAATAAATAAATGAGAGGA | SEQ ID NO: 104 |
| | 169745539 | GGAAAGAAGGAAACAAGGAAGGAAGGAAGGAAG | |
| | | GAAGGAAGGGAGGGAGAGAGGGAGGGAAGGAGG | |
| DG5S47 | 169788696- | CTCCTCCATGGTAGGGACTGGTTCTCTTAGGCCCCT | SEQ ID NO: 105 |
| | 169788899 | GTATCCTCAGGCCCAGCATGCTTGGGAAAATGTTT | |
| | | GCTAATGCTTTGTGACTCAAAAGGAATCACACACA | |
| | | CACACACAGACACACACAAACACACACACACAGT | |
| | | TTTTAATATTATCAGTCATATCAGCCCCCTGAGGCA | |
| | | GCTGCTCTGTTCCAGACAAACCCTGTT | |
| DG5S1592 | 169794522- | TTGAGCTGTTTGGCCTCAATGGCATTTTATCTCTCT | SEQ ID NO: 106 |
| | 169794686 | CTCTCTCTCTCTCTCTCTCTTTCTCTTTTTTTTTTTTT | |
| | | CACATTGAGCCATCTTCTTACAGCTGAGGTTTTCAT | |
| | | ATAAAAAAGCAAGTTGCTGGTTTCTCTTAAAAGT | |
| | | AGGGCAATCTGGCAGTTCT | |
| DG5S119 | 169843903- | GGGTACAGGAGAGTTGTGGTGGGCATTAGTACTAC | SEQ ID NO: 107 |
| | 169844041 | TCCTGCTGCTGCTGCTGCTGCTGCTGCTGTGTCCAC | |
| | | TGTTAGTGACAGAAGTGGGAAAATATTTAAGTTGA | |
| | | GTTCACATTAGTGTTCCCAGTTTAGCGTGAGC | |
| DG5S955 | 169951970- | ACTTATGGAACACCTACTCAGTGCCAGGTATTGTT | SEQ ID NO: 108 |
| | 169952619 | GTAGATGCCAGGAGTACAGCAGGGAATAAAACAA | |
| | | CATCCCTGTCCTCGACACAAACACACAAGTAAATA | |
| | | GAGAAGGTCAGAGATAAATGCTGTGCAGGAAAAC | |
| | | AAAGCAAAGTGAGGGATGGAGAGTGCGGAAGGTT | |
| | | GGGGCACTTTTGTTTCAGATGAGTGTCAGGGAAGC | |
| | | CCCCTTGGAGGAGGCACTGTAAGGGCACAGAATC | |
| | | GAATGAAAG | |
| | | GAGTATGTGAAGGTGCTTAAATTGTTTCTGTTTGGT | |
| | | TTGGTGTGGTGTGATGTGGTGTGGTGTGGTGTGGT | |
| | | GTGGTGTGGTGTGGTGTGGTGTGGTGTGGTGTGGT | |
| | | GTGGTGTGATGTGATGTGGTGTGCGGTGCGGTGCG | |
| | | GTGCGGTGCGGTGCGGTGTGGTGTGGTATGGGTTG | |
| | | AGGCTGGCCTTAGGAGCCTGTTGGCCTTCCAGGCC | |
| | | AGTCCTGAAGCCCAGCCCAGAGCACCAGACTCTGC | |
| | | AGTCAGTCAGTGGAGGGCCCACATCTCAGCCAATG | |
| | | CATGGCTTTGGGTGGTGACTTCATCTCCCCTAGTGT | |
| | | TCCTTTCCCCCTCTGCAAAATGGGAATGGGGATGG | |
| | | CTCAGAACTCCCAGCGGGAGTTAGGAGGAATAAT | |
| | | GTATAGGAAGTATGAGCAGAGTGCCTGG | |
| DG5S13 | 169961410- | TGATGTGCTCGTTCCCATAGCCCCGCTGTGTGTGTG | SEQ ID NO: 109 |
| | 169961530 | TGCGCGTGTGTGTGTGTGTGTGTGTGTGTGTGTGTG | |
| | | TGTGTGTTTGGTGGGGTGGGAGGGGAGGCAGAAG | |
| | | AGGAAGAGAGGGCA | |
| DG5S123 | 170015858- | TGGTGATCAGCTCAGTGTCCTTGGAAAAGAGCAGA | SEQ ID NO: 110 |
| | 170015997 | AAGTGGTATCACGAACATATCTTCTCCTTTGCTTCC | |
| | | TTCTCCTCACTCTTCATCATCATCATCATCATCATC | |
| | | ATCAAATATGGATCTGTGAGGCTACCTCTGGG | |
| DG5S124 | 170041996- | GGAGGAGAGACCAGCATTCACATTCAGTTATTGTT | SEQ ID NO: 111 |
| | 170042336 | GTTTTAAATCCATTACGCACATACATAGGAGAAAA | |
| | | TTTCAGCAACAGTCACCCTCTGAACCCAGTTCCTC | |
| | | AGTTCTCTCCAGAGGCAACTAAAATGCTCAATTAT | |
| | | TAGTGTATCCTTTTGGAAATATTTTATGTATATGAC | |
| | | AGTGTGTGTGTGTGTGTGTGTGTGTGTGTGTGTGTG | |
| | | TTCCTTTCCAATATFAAAATAATATTAACATTGGTA | |
| | | ATAGTGGTACTAAACAACTTAGGGTGTTTTTTTTTT | |
| | | CATTTAATAGTATATTTTTAGTATCTTTCCAGGAAA | |
| | | AGATACATGGATGTGCCACA | |
| D5S625 | 170105556- | TCAATAAATGATTCTGGGGATGTGTCTGTCTGTCC | SEQ ID NO: 112 |
| | 170105787 | ATCTGTCTCTCTCNAGANACANATACACACACACA | |
| | | CACACACACACACACACACACACATCCTGTTAGTT | |
| | | CTGTTTACCTGGAGAACCTTGACTAACATACCCAT | |
| | | TAAAACCAAAATATGTCCTTCAGGGTGTTAATGTT | |
| | | TGGTTGAAGAAACACAGAAGTTTAACAATTGTATC | |
| | | AGGCTGGGCACGGCCTATAATCCCAGCATTTTGGG | |
| | | AGGCCACAATGAGNGGATCACTTGAGCCCAGGAG | |
| | | TTCTAGACCAGCCTATGCAACATAGTGAGACAAAA | |
| | | AAATGAANAAAATTAGGGGTGTGGTGGAGCGCAC | |
| | | CTGTAGTCCTAGCT | |
| DG5S959 | 170167429- | GAGTTCTATGGAACAGCATTTATTGAATAATAACA | SEQ ID NO: 113 |
| | 170167616 | TTTCAGGAAAAAATATAAGCTTTACTGTATATTAA | |
| | | AATACATATATACGTTTATATATTATATATTATATT | |
| | | ATATTATATATTATATATATTATATATATTATAATA | |
| | | TTTATATATTATATAGATATAAATCAACTACAAGA | |
| | | TCCAGTTCAA | |

[0279] TABLE 8
The Build 33 location and size of KChIP1 exons.

| EXON | START (NBCI33) | END (B33) | Size (bp) |
|---|---|---|---|
| 1a | 169716298 | 169716511 | 214 |
| UTR 1 | 169848417 | 169848523 | 107 |
| UTR 2 | 169861083 | 169861154 | 72 |
| UTR 3 | 169864589 | 169864679 | 91 |
| UTR 4 | 169867066 | 169867173 | 108 |
| 1b | 169867120 | 169867180 | 61 |
| Ins-r | 170075401 | 170075433 | 33 |
| 2 | 170081305 | 170081429 | 125 |
| 3 | 170082868 | 170082937 | 70 |
| 4 | 170084380 | 170084450 | 71 |
| 5 | 170085260 | 170085367 | 108 |
| 6 | 170095347 | 170095451 | 105 |
| 7 | 170096383 | 170096445 | 63 |
| 8 | 170098306 | 170099177 | 872 |

[0280] TABLE 9
The Build 33 location of SNPs found across KChIP1
after the first round of sequencing that was limited
to the exons and flanking sequences.

| START (B33) | MARKER | VARIATION |
|---|---|---|
| 169716197 | KCP_e1a_249924 | C/G |
| 169716300 | KCP_e1a_250027 | C/T |
| 169716322 | KCP_e1a_250049 | A/C |
| 169740666 | KNB_24222 | A/G |
| 169740703 | KNB_24259 | A/G |
| 169741172 | KNB_24728 | G/T |
| 169746339 | KNB_29895 | C/T |
| 169747941 | KNB_31497 | A/G |
| 169751742 | KNB_35298 | A/T |
| 169751814 | KNB_35370 | C/G |
| 169751843 | KNB_35399 | A/G |
| 169848476 | KCP_UTR1_382206 | C/T |
| 169848542 | KCP_UTR1_382272 | A/C |
| 169861338 | KCP_3UTR2_395068 | A/G |
| 169864750 | KCP_3UTR3_398480 | C/T |
| 169864875 | KCP_3UTR3_398605 | C/T |
| 169866182 | KCP_e1b_399912 | G/T |
| 170081292 | KCP_1152 | C/T |
| 170081464 | KCP_1324 | G/C |
| 170081473 | KCP_1333 | A/G |
| 170082789 | KCP_2649 | C/T |
| 170085097 | KCP_4957 | C/T |
| 170085116 | KCP_4976 | C/T |
| 170085151 | KCP_5011 | A/T |
| 170085191 | KCP_5051 | C/T |
| 170085217 | KCP_5077 | A/T |
| 170085342 | KCP_5202 | A/C |
| 170095344 | KCP_15204 | C/T |
| 170095540 | KCP_15400 | C/T |
| 170096292 | KCP_16152 | A/G |
| 170098209 | KCP_18069 | C/T |

[0281] TABLE 10

The DNA sequence of the SNPs identified across KChIP1.

| | | |
|---|---|---|
| NAME | SEQUENCE LISTING | SEQ ID NO. |

| | | |
|---|---|---|
| KChIP1 | See FIG. 1 | SEQ ID NO 1 |
| 5G05S872 | TGGCTGTCCCCTCTGCCTGGAGGAGGCTTTGCCCAGATGTC | SEQ ID NO. 114 |
| | CTCCTGGCTCACTCCCTCACCTCCTTATGTCTTGACTCAGAG | |
| | GTCACCCTTCCAGATTAGACTGCCTGACCCCTTCTGTGCTTT | |
| | CTGTTTTCTCCTTATTACAAATGAATCTGCACCATATTTCAC | |
| | TGATTGTGTTTGCTGCATGCATGAGGGCTCACATAAGGATG | |
| | TGCTTTTTGTCCACTTTGTTCATTGCTGAATCACTAGCACTG | |
| | ACAGCTGTACCTGGCACAAACTGGGTGCTTAAGAAATATTG | |
| | TTGAATCAAGGAATCAATAAATGAATGTTATAGAGAAAGC | |
| | AGGAGAATAGATGATAATTGAGAAAACTGAAGCCCAGAGA | |
| | TGGGAAGTCACTGGCCCCATGTCACACAGCAGCAAATGCA | |
| | GAACGGGTCCTGGAACTTCAGCCTCTCAGCCCCGGCCCTGT | |
| | CCTCTCCTGTGCTTCTCACCACTTTATGTAAGTTTTTTCTTTA | |
| | TTTGTGGAGCTCTCAGCAGGCATTTTTCTCTCTGTGCTCAGT | |
| | TGGCATTTTTCCCTTGAACCAGCTGTGTCTTCACTCTCTTCC | |
| | CCATTTTCTCCAGAATATGTTCTTCTGTTTAACTGAATGTTC | |
| | TCTTTTTCTGCAGGTCTGGCCCAACTGCAATATCCAGAGAC | |
| | TTTTCGGTGTCATATGAAAGAAAAGGAGCAGGAAGCCAAG | |
| | ATGCCCCACCTGGCTTCTACATCAGGGTGATCTGCATAGTA | |
| | AGATGCAAAGACACTGACATATGCCTGGGGGTAACGAGGG | |
| | CAGTGGGGGGAGGGAGCTAAGCCAAGATAAGCCTCCTCCC | |
| | CACCAAACATAGGTGCTACTGAGCAATGATAGGGGGCATG | |
| | CTGTCTGCTGTGGTACTTGCGTAGGGAATGCTCTGAGAAAC | |
| | CTGACTAAATCTGCCCTCTAGAGTAGAGCAACCTGGGAGCT | |
| | CAGGCTTCCCTTTCCTCTGTGTGATGGGTTGGCGGTCCTTAG | |
| | AGCCAGCCATTTC[A/G]TCCTGCTCCTTCTCTCCTCCCCTTCC | |
| | TGACCAATAAAGATTGTGTGCTTCTGCCCAGTCAGCAGGGT | |
| | GGGCTCTCACTCCATCCTGCCTCTGGTATGACAGCACAATT | |
| | CCCCTCATTCTTTATAATCATTATAAAATAAAATAACTACCT | |
| | TTTAGAATACTTATTTGATATGAGGCACTTTGCAAACCCAC | |
| | AGTCCTGCATATCCCATTTGACATATCAGGATGCTGGGCTT | |
| | ACAGGTTACCCCAGGGGTGGAGTTGGGCTCAATCCTAGGAT | |
| | TGTCTGCATCTGATTCTGAAGCTTGTTTTCTTTTCCCCTATA | |
| | CACAATCATTCATTCATTCATTCAGTAATTTTTAAATTGAGA | |
| | CATACTATGTACCAGCACCTGTTCTAAGCATTGGATTATGG | |
| | TGATGAATGAGGCAGACAGGGTCCTTCCCACAAATAACTA | |
| | ACTCTATTCAAGCAGTGGGAGAAAAAGCAATGAATGGGAA | |
| | ATAAATGCACAAATCAAGTAATGTTGGATGGGACAACTGCT | |
| | GTGGTCCCATTGAAACAAGCCCAGAGTGACCCCAGTGTAG | |
| | GGACTTCTTCATTGACTGGTTGGGAATTGAGTGACAATCGG | |
| | TTGCTGCATGCTGATGGGTGCCAAATACAACCGTAAGGAAA | |
| | CACTCCCCTGGGAGGGAGGCGGGATCCAGGTTAGGAAAGA | |
| | GCCTTGGATTGAGGCAGAGTGTCAGGAAGTGGGGAGGTAC | |
| | GCAGCTGACCTTGGAGAAAATCCCTGAGTGGTGCAGATCTC | |
| | TTGAATCTGTGAGTGGCTCAGAGTCTTGGTGGAAATGCAGA | |
| | AATCCCCATGCCACTTAGGGGCATCTTCATTCATCTCCAGC | |
| | CCTCCTTTATTAAGTCATGTATACCATCTCCTCTCTTATGCT | |
| | TAATGTCATGCCACTCTTCAATCCTTGTCCCTTCTTTCCCTCT | |
| | GTGCCTGCTTGTGGTTTACTCCTGCTGAGACCAAAGGCTGA | |
| SG05S873 | GGTAATTCTTAAGCTGGCTGGGCCTAAAACTGCAAACTGGTATTGG | SEQ ID NO. 115 |
| | GCATGCCAGAAGGTAACCATAAATGGGCTATTTGGAGATTTCTAGG | |
| | AAGAAGAATGACATTTTGTTTCATTCCATTCCATTTCATTTCATTC | |
| | CATTAATACTAAAAATATTAACTAAAGCATCATTTCTACTATATAT | |
| | CCAGAAGAGAACATGGTCTTAGGTCTTTTAATAAATGAACTTCAGT | |
| | TGCAAACTTTCTGCTGTGACGTTATATTTCTCTTTCCACCCTAGAC | |
| | CAGCCCCTAATGGGGCCATGAAGTCAGATTTTTGGTTCATCGTGTT | |
| | GTCGGGGCAGCATAGCCCAGAATTCCACTTCCTTCCCTGAGGACAC | |
| | ATTTATTCTGGTAGATGTGCTGTTTTCCATTTAAATGTCCTTTGGC | |
| | AATAAAAGAGCTGGCTCCAACAGCAGACCACGGGGCTGGCTTTGTC | |
| | GCAGACACCACGTGTTCATGACTGGCAGCTTTGTCTGGAAGAGGG | |
| | AGCTTTTAAAATGCAGTTCTATGCTGACTCTTTGGAGTCTTCCCAG | |
| | GAAGATAACTGCTATTGCATTGCATGCTTAATTTAGAGCACCTATT | |
| | TTTCCCTCTCCTTCAAGGTTTCTGTATATCTTCTCAGTTCATGAAA | |
| | TTAATTATTTGGGTACAATAATTGTACAAAGGCACTTTATCAGACA | |
| | CTTCGTATAATTATTTCTCATTCTCAAGGCAACTTGGAAAGGTCA | |
| | GTCTAGGGGTCAGCTGCTACTTTTGGTGATCAGGCATCACCCCCTC | |
| | CTTCCTCTTAGTACGTTATGACAGTGGCAAGTGAGCATTACCTGTG | |
| | GACCCCAAAGGAGTTCATTTCCTTAGAGCCAGCCATTCCTCAGTTA | |
| | ATCTGG | |
| | TCTGTCAGACACTCTGTCCCAGGACACTGAGCCTTGAGCAT | |
| | GTGAAGGTGTGGGCTCTGCTGGGGGCTTGGCAGCCAGGACC | |
| | TGTCTGTGTATCACCTGGCTCCTGCAGCGAGAACCTGC[A/G] | |
| | GTGTGATTTCTGCAGCCTGGCCCTCTGAGATTCCATGGCTG | |
| | CTGACCATTTTCCACTTTCCAAGACTGTTCACATTCCCAGCA | |
| | ATTCTGTGAGGCGGTGGCCTTCAAAGGTGTTCAATACATTC | |
| | CTTTTTTTTTTTTTTTTTTTTTTTTGAGACAGAGTCTCACTCT | |
| | GTCACCGAGCCTGGAGTGCAGTGGTGCCATTTCAGGTCACC | |
| | GCAACCTCCACCTCTCGGGTTCAAGCAATTCTTCTGCGTGTG | |
| | TCTGGCAAGTAGTTGGGATTACAGGCACACATTGCCAGTTA | |
| | CGGCTTTTTTATCATTATTATTATTATTTATTTTTAGTAGAG | |
| | ATGCAGTTTTGCCATGTTGGCCAGGCTGGCCTTGAAGTCGT | |
| | GGTCTCAAGTGATTCACCCACGTGAGCCTCCCAAAGTGGTG | |
| | GGTTTACAGGCGTGAGCCACTGTGCTGGGCCCCATTTGTTA | |
| | TTTAAGGGAGAGTCCGTTTGTGGTGTTTGTAACTAAGGACC | |
| | TGTCTGATCTCTAGGAATTATTGACCCCAGTTTTCAGATAA | |
| | AGAAGTTAAGCTTGAGGTTAGAGCTTTTGAGCAAAAACTCC | |
| | TCTCCTAGAGAACTCAAGTATCGAGGAATACTCGGTCAAGG | |
| | CTGGGCTGGACCAGGTCTGTAATGCTGATATTCAGAAAAGG | |
| | GATGATTTCTCCTCTTTGGTTTGGTTTTCTCACTGAGGCCTG | |
| | CACACCAGTTTATTTCCTGACTTGTGCATTCAACATGGGCA | |
| | AATCCAGGTCAACAAAGACTGGCAGCTTATTCCTGAGTACA | |
| | GTTCCACCAGGTATGGCACACAAAGTGATATGAGTTAGAAC | |
| | ACAGATGGATATAGATGTTTTACAAATGTAAGTTTGCATAA | |
| | CACACACACACACATTGCTATGTGTTAGAAAAATACAATAA | |
| | GCTCATCTAATTTATTATTTCATGTGTCTTATTGGTCAGAAA | |
| | GAGGAAAAGATTTTATGAAGTTGAGAAAAGAAATTGAAT | |
| | TAAAATAATA | |
| KCP_rs31 | AGAAACTCCGACTGTCTTTCAGCAGACAGAAGACACTGTAC | SEQ ID NO. 116 |
| 5773 | TGGACCCGGACATTAGGGAGACACCCACGCCTGACTTTCAG | |
| | GAGAAAAGAGAACATGACTAACGGATATTCTTAGTAGATG | |
| | GTTTATTAGAAAAGAGAACATCTTCCAGCATGTGTCCTGGG | |
| | GTGATGGGTGTGGGAAGCACTCAGTCGATAGTCCTGGTCGC | |
| | TGGCTTCCCCAAGCCCAGCAGCATGAATGTACAGTGGAAAG | |
| | CAGAGGGTGGAGCGTGTCAGAAAGATGCTTCCACTCACAA | |
| | GGATTGGAGCTGAGAAGTGAGCTCCATAACGTGCAAACCA | |
| | GAGAAACCTGAGACACTGCCCCTTGGCCATTTTATCAAGGG | |
| | AGACTTTATTGTGATTATCCGGGCAGGGGGCCGAGCTCTCC | |
| | TCTCTGCAACAGGAAATGGTCTTTAGTGAAAATGCAGCATT | |
| | TCTCCAAGGGTAACAAAGCTGAACGCCTGCTTAGCTTATGA | |
| | ACCCTCAGTTGGCCTAGGTGGTGGAAAGACCCTGCTGTTAC | |
| | TGCTTTGATCATCAGTAGTGTGGACTGTACGAGGAGATGGG | |
| | TGGGAATGTGCTGTGGGCGGAAGGAGCTTTTATCTTTGGCC | |
| | CTCACCGATGCTTTATATGGTGAGGTTGGGAAAATGGCAGA | |
| | AGGCTTCTCCTGAACCTCAAATCAACAGCGTTGCCCGATTT | |
| | AGATCCTATCTGGCTGTTTCTTGCTAATATTACTGCATCACT | |
| | GCACCATCTTTCCTATTTGAGCAAAGTGGAGTGATGTGTGG | |
| | TTTATGGGGTAGATGGACCCGAAAAGTGATAATATGAATCA | |
| | AGCTATGGTGTTTACTCCCTAGGAAATGCACAATTTTTCTG | |
| | GAAACCTACAGAAGCTTCAAATGCATTCGCCATGGAAAGCT | |
| | AAGTCAGCAGAACAACCCGTTTGGCTTTGGAGGCTAGTTCA | |
| | GTTCCGCGGACAGGGAGAAAGATGAGGCAGAGTGTGGTTT | |
| | TTCAGTTCCTGGAGCTTAC[A/G]GAGCTCCAAAGCTCCCTCT | |
| | CTTCCCACCCTGGCTGCACTGTTCTTAATTTTAGATAATACC | |
| | CTGCCTTCTCGTATTGCTGGTGAGGTGCTAGCATGCTCAGTT | |
| | TATCTGTCTGTGAAATGAAAAATCTAATGTTAAATTTTTTAG | |
| | CTATGGCATGAGAGAGATGGCTATGGCTGTTGTGAGCCTCT | |
| | CTGCAGCCCCTCTTTTCCTTCAATCACCCTCTGTCTGTCGTG | |
| | CCTTCTGCTTATTCTCTCTCTCCCCTCATCCCCACTTTCCCAG | |
| | TGGGTCCTCTGTTCTCTTTTTTTTTTTCTTTTTAAATCTCTCT | |
| | ATGCCTCCAGCCGAGAAGATAAAGAGTGTACATCTTTCTGG | |
| | TTAAAAAGTTTTGCTTTGCAGAAACACAGCCAATTTATGAT | |
| | TCTGGCCTTCCCAGCTAGGGACAGTGTTCATTTACATTTAG | |
| | GACCATGAGGAGAGAGGCTTAGCTGTGTGTTTCTGAGGCCG | |
| | GAGAAAATTACAGTGATATATAACAGTGCTGCACTCATAGA | |
| | GGTGGTGAGGCGGGGTTGGGCTCAGGCGGGCGCTAAGGTC | |
| | AGAGTGGAAAGTTTCAGAGGGGAGGCAGAAAGGAGAGGTC | |
| | TATAGCTCCTCCAGATTCTAGGTATTAATTTACTAAGATATT | |
| | CCTAAGCGAGAAAACAGAGACAGAAGACAAAGAGAAAGA | |
| | GGGAAGAAGAGCAAGACAGAGAGTTAGAGAGAGACAAAG | |
| | AGAGAGAGTTAGAGAGAAAGAGAGAGTGGAGAGGAGAGA | |
| | GAGCAAATATTGAAAGGAAAAGGAAAAAGAAAGAAACGT | |
| | GACAGCTCATGAACTTTTTAAAAAGTTACAAATTAGATTTG | |
| | AAGAGATGGGCAGAGGTTTAAGATTTCTTCATTAGGCTGGG | |
| | TGTGGTGGCTCATGCCTGTAATTGGAGGAGTCTGGGAGGCT | |
| | GAGGGTGGCAGATCATCTGAGGTCAGGAGTTGGAGACCAG | |
| | ACAGGCCAACATGGTGAAAGCGTGTCTCTACTAAAAATAC | |
| SG05S876 | TATATACAACCTGGAAGCTCTTTTTCCAACCATATCACAGA | SEQ ID NO. 117 |
| | CAAAGAAATTGAGGCTTGTACAGGTGAAGGGGCCTGCCTTT | |
| | CGTTTGCTCACAGGAATGTGAGGATGATACAAAAGTGAAG | |
| | GATATTGGCATTCTTCAGGCAGGGAGATAACGTGGACAGG | |
| | GGTGGTGCAGCAGGCATGTGGATAAAAGGAGCAAGAGAAG | |
| | CCTTCTCTGTCGTGAGCAAGCTTGGAGGCGAGATGGAGAAA | |
| | AATGAAGTAAAGTGACCCCAAAGGGTGGATTGTCATGTGGA | |
| | GTGCCTCTTGCCTCTTGCCCTTCCCAGAACGCTCCAGCTTGG | |
| | CACTGGGCTGGAATTCCACTAAGAATTGAGTTGATTTCGTC | |
| | ATCTGAGGCCCTGGGCACAATGACAAGGGTGGTTTTCTCGG | |
| | ATCTGCAGTGAGCATTACACCAGAGTGTGGGAAACAGTGC | |
| | CTACTCAGGGACCGCACTCTGGGACCCAGGGCAAACTTGCC | |
| | ATGGTGTCCAGTCAGCTCATTAGCCGCCCAGGACTCTGCCA | |
| | GCCCATCCAGGCAGTGATGTAATTACCAAAATGGAGATGA | |
| | ATATTTAAAGGGACTCTTACTTAACCGATATACTTCCTCTCC | |
| | AAGTTCCCTCCTTCACCGGCTCTGGATGAATTTCTGGAGGG | |
| | ATTGCTCTGACATAGGCCCAGAGCTACCTGTGGTTTGACCT | |
| | CATCATGAGGCCTTTCTTCACCCTTTCTTGGTGGCTTGCCTT | |
| | GAGGGTGTTAGGAGATGGTCCATTGTCTGACTGTGAACAGC | |
| | AGGGCAGCTCTTATATTCTCCATCAATGGATCTCTGGGGAC | |
| | AAGACCCAGATGGGTGGGGGGAGAGGGGAAGGAAACATA | |
| | AAAGCCAAAGGGACTGGATACCTGTAACTAATTACCCCTTT | |
| | ACTGTTTCTGTCACCAGACCTTAGTGCCACAAAGGATTGGG | |
| | GGTCATTTGTGACAATGTATGTTGTAAAATGTAAAATGCAA | |
| | GTGACCACAAATCTGAAAGC[A/G]GTATAGAGCTTTGGTTA | |
| | AAATAATGCAGGCTCTCCACTGGCATTATTATTGTTGTTAG | |
| | GAGAGTCTGGTGCTCTGTTCAAGGGCTTTTCTGTGCTATGG | |
| | ATTATCTCTGTTTAGCACAAAATATCTTGTGTCCCTGGAAAC | |
| | CCCTTAGTCCTGAGAAAACCAGGGCAGTTGGTCACCCCCCT | |
| | GTTCAATGCAGGCATCAGTTCCACTAGGTAGGGGGTCTTAG | |
| | CTGCATTTTAAAGATAAGGAAATAAAGACTTAATGGGTTGG | |
| | AATAACTGGGTTATGTGCACATAGCTAAAGAATGGTTACAC | |
| | AAACAACTTCAAGTCAAATATTAGACCTGGGTATTCCTAAA | |
| | ATCCCTATGGCTGTTTGCAATAACTTGAGGCCAGCCTCCCT | |
| | CTCCTCTTTTCTAAGCCCTCTTTACCTTTCTGTGTCCTCTGAT | |
| | GGCTGTTGTTTATCAAGGCAACCATCGTGATTCATACCTCA | |
| | AAGCACGCTTTGAATTCTACTCCTATAGGCTCCAAAACCCT | |
| | TATTATCCAGGTTCAGTATTGCTCTAAACTAGGTGAGGTCC | |
| | TGAACAGACCCAGATTTCAAGCATATTCAGGTGGATTTGTT | |
| | TAACAGAGTGTGGCTAGTGGAACATCTGGAGCCCAAAGTA | |
| | CACAGGAGGCAGGAGAGAGCCTACTTTCCTGAAGAGAGGG | |
| | ACGGGCCAAGTGTCCGACAATGAGGAGGTGGGCATTCTTTC | |
| | CTTTGTAAAACAAAAAGTATCTGAGACAGGGGTCAGTCAAT | |
| | TCAGAAGCTTATTTTGCCAAACTTATGGACCATAACCCATG | |
| | ACACAGCCTCAAGAGGTCCTGAGAACATGTGCCCGAGGTG | |
| | GCTGGGTTACATCTTGGTTTTACATGTTTGAGGGAGACTGA | |
| | AGAGATCAGTCAATACATGTGAGGCATAGATTGGTTGGGTC | |
| | CAGAAAGGCGGGACAACTTCAGAGGTGGGGAGTGGGTTTT | |
| | AGGTCATGGGTGGATTCAAAGATTTTCTGGTTGGCAATTGG | |
| KCP_rs95 | AAAAGTAGCATGGAGAATCAATTTGCATCTCAGAATTGGGA | SEQ ID NO. 118 |
| 2767 | TCCCTGCCCTAATCTCTCTACTTTATGCGGCCGTGTCCTGCT | |
| | TTTCATGACTCTAGAAAGCAGAGGAGAAAGTGGATGTAAG | |
| | ATATAAATTAGTCTGTCTTGTAGGGCTTTCTCTTGGTCCCAT | |
| | TCTGGGACCAGCCAGTGTCCATACCTGTGGGCTTTGGTATC | |
| | CAATTTAAGGCAGTTCTTCTCTTTCCATGATCACACAGTAA | |
| | AGGAGCCCCCGTATACAGTGCTCCAGGACTGAGTCCAGTTT | |
| | TTAGTGTAGCGTGCAAGAAGAGCAGAAAAGGGAGAGTTGG | |
| | GAAGGAGATGTCAACGGGCAGGAATGAGGTGGTATAAAGA | |
| | CCCTGGGCATTTGGAGGCAACAGAGGGAGAAAGGTCTGCT | |
| | TCAAGGACCAACTTGGTCTCTTCCTATCTCTGCCCTGGCAGC | |
| | ACCAGCAGCTGCACATTGGCCCTTCTTACCACTTCCATGGC | |
| | AAAACCAAG[G/T]TTTCTGTACGTCGGCTAGCCGGGCCCTGC | |
| | AGACTTGGTGACACAGCTGAGTGCGGAGTGCATCTAGACCC | |
| | CAACATGAGGCGCCCTTCTCTCAAAACAAATGAGCCTTCGA | |
| | AACTCCAGCAAACAGTGCTAATGAATTGCCCTCGGCTTCTT | |
| | AGGCATCATTTTCTCGTAATTATAATGGGAAGAAGAGATGG | |
| | AGTGGCAGTGAGAACGTGGAGCTAGGCTGCCCCTAGAGCA | |
| | AGGCAAAATCCCCTCTGAGGACCACACTCAAGCAGAACT | |
| | GATTTTTCTAAGACTTAGAGAAGAAACAAAATCTGATTTAA | |
| | TTCTTAGGAAATTGCTTTTTTTAACCCACCTGTGTAAGCCTG | |
| | TATTTTAAATGCTAATATATTTGGCCTGCCGGGATGCCACAT | |
| | TTATTTTCTTCCTTAGCAGCAACAAAAATCATTTATTTATGA | |
| | GAATTGTAGCTCCTACCTGCTCTCCTGAGTTCCTCATCTTCA | |
| | TTTCCATCTACCAGGTGGA | |
| KNB_2422 | GAGGGGTTTTTAAGATTGTGTGTTCTGAATGGCCTGTCTCTGACTG | SEQ ID NO. 119 |
| 2 | GAACCCAACTCCGTCCCCAGACCCACTTCCATCTTTTTCTGTGAGG | |
| | GGGACACACTCTTTCAACTTTTCCAAAATGGCATCTACCATGGCTT | |
| | TTCTGATTAAAAGCAAACGAAACACACCCTTCCTATAATCAAAAAT | |
| | TTAGAAAAGCAGCAAAAATAAAAAGGGGATAAGGAAGAAAACAGAA | |
| | ATTAACCACCATCCC[A/G]CCGCTAAAATTTTGATGAGTTCTCAT | |
| | GTGTTTCCTTNCAGCTGATTGTTGTTTGGCATACATTTATTAA | |
| KNB_2425 | CACTTCCATCTTTTTCTGTGAGGGGGACACACTCTTTCAACTTTTC | SEQ ID NO. 120 |
| 9 | CAAAATGGCATCTACCATGGCTTTTCTGATTAAAAGCAAACGAAAC | |
| | ACACCCTTCCTATAATCAAAAATTTAGAAAAGCAGCAAAAATAAAA | |
| | AGGGGATAAGGAAGAACAGAAATTAACCACCATCCCNCCGCTAA | |
| | AATTTTGATGAGTTCTCATGTGTTTCCTT[A/G]CAGCTGATTGTT | |
| | GTTTGGCATACATTTATTAATATTGGAATTAAAAATATATATGGCA | |
| | CTTTATATCCTAGAAATAGTAATACTGTAAATGTGTTCTAGAAAT | |
| | GGGAGCTGCTGTTGCTCTTATTAGAGAATTCAAACAAAGAAGGGAG | |
| | GCTCGCTGGGGACAGCTTCTGGGGGAGGATGGGTACCGCTTTGAGA | |
| | CA | |
| KNB_2472 | AGGTATGAGTCAGTTGAGTGGGGACAGGTAATAGAGAGCTAGAACT | SEQ ID NO. 121 |
| 8 | GGCTGGCCTTATGGCCTCCAAGGCATTGGGGAGCCACTGTACATTC | |
| | TTGAGCAGGCAATGACTTCACAAAAGGATTTCTCAAAGGTTAGTCC | |
| | TGCAACAGAAGACAGCGTGGATTGGACTGGAAGAGTGGGAGGGCAG | |
| | GTGGAGAAGGCATTG[G/T]CTGCAAGTGGGGAGCAGCCCTGGGGG | |
| | CCCAGCCAGTCCCCTGTGCCCTGACAAGTGGTATGGCATGGATGGA | |
| | TGGCTCTACTTCTGGGCCGCCAGGATGGACAGGTACTGGTTGCTCT | |
| | TCACCATGGCGATAATGAGGAGGCCACCGGTCAGCAGGAAGGTGGG | |
| | CCAGAAGAGGGAGAAGAGGAGGGCCTGGGGCCCGTAGAGGCGCTGG | |
| | AAT | |
| KNB_2989 | CCCCATCCCTCCAGTTCAGTACCTGCTGGTTCTGGTCCCGAGTGTC | SEQ ID NO. 122 |
| 5 | CTCCGTGTGGTACAGCACAGCCCACCTGCCGGCAGCTGACACGTTG | |
| | ACCCACAGGCATGGGTACTGGGGCACCTTCTTGCCCTTCAGCT[C/ | |
| | T]CTCCTGGTCCCTGATGTTGGTCTCAATCAGGTGGCACTTGGATT | |
| | CCTGGGTCCACACGCTGAGGAGACCACACACATGCACACATACACA | |
| | TCTCAGAACTGGGTGACACACAGAACACCCATTTGAACCCATTATC | |
| | CCCTGGGAGCCTCTAGAGGGATCCAGGACTGGGCTCCTCATCTTGT | |
| | CTTCAGCATCCAGCAATAAAGGCACAT | |
| KNB_3149 | TTCCCTGCACTTGAACCCTAGAACCTAAGAATGAGCATCGTCTTGA | SEQ ID NO. 123 |
| 7 | CCCTGCTGCCTTGAATGAGGGTCAAGGAGAGGGGTGAGTAGAAGGC | |
| | CAGGGTTCCTTACAGATGCCAGACCCTTAGGAGAGGGTTGGGGGGT | |
| | GGGCAGGCCNGGAGAGCTCAGTACCTTTTCTGGTAGAGGGGCAGCA | |
| | CAGTCGTGACCAGGATGTAGTAGGTGATGACGGCACACACCACCAT | |
| | GGTTACACCCAG[A/C]CAAAGGGCTCGTGTCTCTCCCCGCTTCTG | |
| | GGCCATCACCAGCTTCTTCACCATATTCACTGGGGGCAGTGATCAT | |
| | TTCTAGGTCCACAGAAGCAAACAGAAGTGAGATCAGCCCAGTTCAC | |
| | AGGTGATCCACAGAAAGAGAGGACAGGTGAGAGGGGAAGGTACTCA | |
| | ACTATTAATATCACTCTTGTTTATATTTGGAGCTTTGCAACTTCCA | |
| | GAAGTCTTGCTTTTTGGACCCCATGTA | |
| KNB_3529 | AGAGGAAGGGAGTCCTCCTGCCTGCCTCCCTCCCTGCCCCGTGGCA | SEQ ID NO. 124 |
| 8 | GGCTGCTTTCCCC[A/T]GTCTCCCTCCAGCCCGGTCTTCAGAGAA | |
| | ATCACTTCCCAAGTGCTTTCAGGCCCGGTACTCACAGTCTTCCCGG | |
| | CGTCCTGTGGGTCTTGAGCAGCAGACAGTTTCTTTCTGCCTGGACC | |
| | C | |
| KNB_3537 | AGCCCGGTCTTCAGAGAAATCACTTCCCAAGTGCTTTCAGGCCCGG | SEQ ID NO. 125 |
| 0 | TACTCACAGTCTTCC[C/G]GGCGTCCTGTGGGTCTTGAGCAGCAG | |
| | ACAGTTTCTTTCTGCCTGGACCCCCGCCCCCACCCCAAAAGAGGCC | |
| | ACAGAGCTTCA | |
| KNB_3539 | AGCCCGGTCTTCAGAGAAATCACTTCCCAAGTGCTTTCAGGCCCGG | SEQ ID NO. 126 |
| 9 | TACTCACAGTCTTCCCGGCGTCCTGTGGGTCTTGAGCAGCAGAC[A/ | |
| | G]GTTTCTTTCTGCCTGGACCCCCGCCCCCACCCCAAAAGAGGCC | |
| | ACAGAGCTTCA | |
| KCP_rs31 | CTTATCTCCACCCTTCACTTGACCCAAGAATCAAAGAACCT | SEQ ID NO. 127 |
| 4129 | GAAACTGAGACTTGGAGGCTTGAAGTCACTGGTGCAACCCT | |
| | AGGGGCCAGAACTAGATTCGAAGCTGGCCCTTGCAGATGG | |
| | CACAGCTTGGTCTGTGTCTGATGACCCTGGGGGTGCTCTGA | |
| | GACATTAAAAATCAGGTGGATCATACAGTAAGCTGCCACGT | |
| | GAGGCTGTGGAGGTCACCGTGAGTTTCCCCAGCCCCCAGGG | |
| | AGGTGGGTGCAGGCTGGCCTTCCCTGCTGAGCGAGCTGACC | |
| | ACCTTGCTCCCTCGTGCCTGCAGCAGGCGCGAAATGAAGGC | |
| | AGGCACTCAGGCCTCCCTGACACACTCTCAGGCGGTGAGTG | |
| | CCCTTCTCCACCCCTTTCCTAATTGAATCTTATTAACAGGAG | |
| | ACTACAGTGTCTGTTTAATGGGCACCATAGCACCAGAGGGT | |
| | CTAAGACCAGCTTCAGACCTTGCAGGCAGATTGACAGAGG | |
| | GATGTAGGA[C/T]CTGGAATTCAATCTCAGAAGAGCAATTTT | |
| | CCAAGGATGATGCTCTGTGCAGTCAGAAGCAGGAAAAGTCC | |
| | TCCTGGGGCTAATCCAGAAATGCCAGGCCCCCCTCCTGCTT | |
| | CCCTGGGGGAGAGATAGACAGTGCAACAGGCTGCCATTTAT | |
| | GAGTATAACCGAAGGGCTCCTFGCTCGTGATAGTGTGAATA | |
| | AGTTATTAAGGGCTACATATTATTTGGAAATCATAAACAAA | |
| | CTTTAGCATTCTTCCCAAGGGAAGGTGGGAAGAAACAGGG | |
| | AAGGGGGGCCGTGGGGTCTTCTGCTCCCCCTAAATGAGCCA | |
| | CAACCAAAAGGCATTGACAAGCCCTGTCCTCGAGGGTTTGT | |
| | GGGTGAAAACCGAGGTCCTTTGCTGGCTGGGGGGTTGTGTG | |
| | TGACAGATGGCTACAGGTGGAGGGCAAGAAAATAACAATG | |
| | CTGCAACAATAAATATTGACGGTTTGCATTAGTACGGGGTG | |
| | TCAGAGATCACAAAATATCTTC | |
| KCP_rs18 | TACTTTTCAGCCTGAGGTCTGGTCCTCACCAGTAACACCGTT | SEQ ID NO. 128 |
| 3398 | CCCTCCAATCAAACTGATCCATTGTACCTACAAAAAGCCCG | |
| | TCCCACCTCCTAGCCTTTGTTCACACTGGGTTGTCTGCTGGA | |
| | TCACCATCCCTCCACATTTCCAGGTGTCCCTCAAGACTACTC | |
| | AGCAGCAGCTATCCATACAAGTTCCTCAACCCTGGCTTTCT | |
| | TGCCCTCAAGTAACCAGTTCATCCTCCCCAGTCATATAGCC | |
| | CTCTATTTACATTTCTTTTCTGGAAGCTATGATTTTTCACGT | |
| | GCCATTTGAGTGAGTGTCCTCGCTAAGAGGATATTTTCTTTG | |
| | AGGGCAGTAACCTTTCTTATATGTCTCTGTATCCCATGAACT | |
| | TAGCAAAAAACAAGGGACAGAACAGGTGCAAAGTCTACGT | |
| | GGTTAGTGAATTTAACAGATCTTCCTAACGTGTAAACGTCG | |
| | TTGTCCAGGTGAATGGAAGAAGTGAGCTGAGATAGAGGGG | |
| | ACAGACAGAGTCAGTGTCGAGTGCTGAGCTCTGAAATGGA | |
| | AAAACATGGCCAGTCCTAGGAGGCTGCAGAGGCCAAGAC | |
| | CCCAGTGAGGTTTGGGGGTTCCACAGGAGAGGAGGAGCTG | |
| | TGGAGCACAGCAGGACCCGGATGCCATCAGCAGGGGAGGA | |
| | AGTAATCAGAGAGGTGGAGGAAGGAAGCCAAGGGAAGTC | |
| | AAGTAAACACCAAATATTCCCTCCCGGTGCAATGCTGTGAG | |
| | CTGCATAAGCCACCACTGCCCCAGTCTAGACTCTACCCATG | |
| | GAAGAAGGAAGAAGATAGAACTCTGGATTTGAATATAATT | |
| | CTAAAATAACCAAATTTATCTGAAAATGACTAGGCTGAGTT | |
| | TTCTGCTTCAACCAGAAATGGAGCTTGGAGTCAGAAATTAT | |
| | GTGAAATTATAGAAGAGAAAGTCACCATCTTCCATCTCTGA | |
| | GTCGTATGATCATTTTAGACATAAAATTGTGCACTTACGAT | |
| | GTACCAAGTGCTTAATATA[C/T]GTGATCTCATTTCACCAGG | |
| | GAAACTGTATAATTCATTGCTTTAACTGACAAAATTCTGCA | |
| | ACTGAAGAAGGTGCTGTTAATAATTGCATTGGGACGCAGGC | |
| | CTGAGCAGGCCATGATTTGTGGCTGTGCTACATCTGACCCT | |
| | CACAGTATCCATGGGAGAAGGCAGCATGTTTATGCCGGCTG | |
| | ACAGCTGGGGAAACCAACACTTAAAGTGATTAAGTCACAA | |
| | GTCCAAAATAAATGACAGAGCTGCAGTTGAAGCCCAGGTG | |
| | GTCATTTACCAAAGGCCATGGTCTTTTCACTTTGCATGGGAG | |
| | TGTGACCGCTGGGTGTACCCAGCTTCCCAGTGCGACCCTTC | |
| | CCCGCCCACTGTTTCTCTTCTCTGGCCAACGGAAACACAAT | |
| | GAGACCACATATGTAACATTACATTTTTTCATAGCCACATT | |
| | GAAAAGAAAAAGGAACCAGGTAAAATCCATTTTAATATGA | |
| | TATTTTATTTAACCCAATACAGTTGAGGCTTGAACAACACA | |
| | GGTTTGAACTGTGTGGGTCCGCTTACACATGGCTTTTGTTCA | |
| | GTCTCTGCGACCCCTGAGACAGCAGGGCCAGCCCCTCCTCT | |
| | TCCGCCTCCTCCTCAGCCCACTCTACATGAAAACAAAGAGG | |
| | ATGATGATCTTTTTGATGATCCACTTTCACTTAATAAATAGC | |
| | AAATATATGTTCTCTTCTTTATGATTTCTCGTAATAACATTT | |
| | TTTTTCTCTAGCCTCATTTACTGTAAGAATACAGCATATTC | |
| | CCAGCTACTCAGGAAGCTGAGGCAGGAGAATCACTTGAAC | |
| | CTGGGAGGCCGAGTTTGCAGTGAGCCAAAATCGCACCATTG | |
| | CACTCCAGCCTGGGCAACAAGAGCGAAACTCCAACTCAAA | |
| | AAAAAAAAAAATAAAAAGAATACAGGGTATAATGCATGTA | |
| | ACATATAAAATATGTGTTAATCAACTGTCTATGTATGGGT | |
| | AAGTCTTCCAGTCAACAGCAGGCTATTAGGAGTTAAGTT | |
| rs103285 | CGCTCAGCAGCCATTAAAAGGATATCATCCAGTCACTTAGTTTCTC | SEQ ID NO. 129 |
| 6 | AATTTAACTTTAAAGGAAAGTTGCCTTATTAGAGAAGTGGCCTCTA | |
| | TTTCAATGTAATGGTCTTTGTCACATCTTCCAATGTGCTGGCTTAG | |
| | TGCTGAAGGATGGGGAAAGGCAGTTTTCACATATTGCAGCCACCAT | |
| | ACCACCAAAGAAAACAGGTGCACTTCCAGGCATCATTTAGCGGGGT | |
| | ACCA[C/G]ATTCCTGGTTCCAGTTTCCTTTTTAGAAATCTGAAA | |
| | GTAACTTTGGGGCATATCTTTTAAGGAGTACTCCAACACGACTAGT | |
| | GGACAGACCCTAAATTAATTGCCAATCAGCTCTGCCTTCTGGTATT | |
| | TACACCTTTATGTAATAACCTCCACTTGAAGGTAGATGAGATCTGT | |
| | GACTTGCTTCTAACCAGTGGAATATGGCGGAGGTGGTGGGACGTTA | |
| | CTCCTGTGATTACATTACATCATGTGGCTCCTTTATGATGGAAGAT | |
| | TCATGCTAGAGATTCTCCTTGCTGACTTGACAAAGTATGTAACCAT | |
| | GATGAAGACTTCCACGTGGCAAGGAGCTGTGGGAAGCCCAGGTGCT | |
| | GAGACTGGCATCCAGCAAACACCCAGCAAGAAACAGACGTCCTTGG | |
| | TTCTACACATACAGGAAATGAATTCTGCCAACATCCTGAGTAAGGC | |
| | TGGAACTAGATTCTCCCCAAGTTGAGCCTGACAAGTAAAATACAGA | |
| | CCAGCCAACACCTTGATTGCAGTCTTGTGAGACCTGGGGAAAAGGA | |
| | CACAGCTGAACCGTGTCCATTCTTCTGACCCACAGAAACTGTCACA | |
| | TCATAAAGGTATGTTAGTTGTTACACAGTTTAGAAAACTATTACAG | |
| | CTGCTCAAGAAGGTTAGCTAGCTCCAGATTTCAATCCATTCACAGG | |
| | AAAGCAAGCTTTATTCCTAGAAGAATAATTCATGCTTTGCAAAAAG | |
| | AGGAAAACGTCCTGCAGTTTTAGAAGGTCTTTTCTTTCTCAACACA | |
| | CCCAAATTTCTTTAAAATCCTCAAGAAGTGCATTTGTTTTCATGGT | |
| | TGACTCGAAGAAGTGAGTATAATTAACTCACAAAAGGTGGGAGGAA | |
| | GGGACAAATTAAATTTTGGT | |
| KCP_rs88 | CACTCAAAGGGCTGGGGACCCTTGTCCCTCCCATGTGCATC | SEQ ID NO. 130 |
| 8934 | CATGTGTCCTATCTCTGAGTCCCCAGTGAACTGCTGCCTCCC | |
| | TAGAGAAACAGTGGTAGAAGTCAGTGGCAAGAGCAGCAGG | |
| | AGGACTTGGAGCTACATGCAGAGTGTGAGCTCCGGAGTCA | |
| | GACCAGCTGAGTTCAAGGCCAGCTCCACCATCTATTCACTG | |
| | TGACTTCAGGAAGGTTGCTTAACCTCTCTGTGCCTTAGCTGC | |
| | CTCATCTATAAAACAGGAAACAATGAGAGTCTTTCCTTATG | |
| | GGGCTATTGAAATGATTAAGTGAGATCAGGCATGTGATGGC | |
| | ACACAGTAAGAAGTGCATAAAGAGAGGTCACCACTGCTAA | |
| | TGCAATTATTCTATCACCTCAGGAGAGTAAAGCAGGGGAGG | |
| | AAACACCATTGACTCCTGGACATTTACCCAAGGAGATTATG | |
| | GATCCATGTTTTGCACACACTTTAGAAAGACAAGGAATTCT | |
| | AACCACAGC[A/G TCTGTCTCCACTGCCCCCGTCATTTCAGT | |
| | CTCACCCGTCCACCCTCAACCTCACCACTGTGGCCCGGAAA | |
| | TGCGGTTGCCCAGGGCCACTGTCACGCGACCTCAGCCCTGC | |
| | TCTGCTCAAGTCTCACTTCCACTCCTTCCAGCTCCCATCCCT | |
| | TTCTACCCAGCTCCACCCTGATTTCTCCACCATGACCTTTAC | |
| | CCTCCTAGTCTGATGTAGACCCCTGATGTTGCCGAGTATGTA | |
| | GGACTTTGGTGCCTTTGACCCTCAGCAGCAGAGGTAGAGAG | |
| | GGATCTCGGTGAAGTCTGGGATGTTATAGTGACTTGTTTAT | |
| | CTAAGTGCCCTGAGACTGTGAGTTCCCTAATGCAGGGAGCA | |
| | TCAACCTCTGCAGAGAGGCCGAGAGCGCTGCTCAGGTGTGA | |
| | TGAACAGGAGGCACTCACTTGATGCCCTCACAAAGTTGTGA | |
| | GTGAATGAATGAATGAGTGAATGAATGATTGAATGAAGAT | |
| | TAGTGATTATGTTAATGA | |
| rs905823 | GGTGGGGGGGGAGAGGGGAGGGGAGGAGAGGGGAGGGGA | SEQ ID NO. 131 |
| | GTGGGGGAGAAGGGGAGAAAAGCGCAGCTGGCTTCCTCAC | |
| | TCTCCTTTCCTTCCTCACCATCGTTACCCTGGCCCAGGGCAG | |
| | GAGGAGGATTGGCAGAGTAGAGGCAGGGTCTTCTGTCTTA | |
| | GCTGGGCCTGTTGGTGACTTTCTGTTGGCCAACATGGGCTG | |
| | ACTGGAATGTTCTCCAGCATGGGACATGGTCATCCAGATGC | |
| | AGGCTCTTCCCTGGGGCACTATAGCAGAGAGGGGTGTGTTC | |
| | CAGTCTATTGCAGATGGATGCCCTCGTGAGCTGAGTTTTGA | |
| | TGAACATCCCATGTCCCCAGCCACCCCATTCAGAGCCTCTT | |
| | TCTACTCTGGTCCTGTGGTCCCAGCAGCAGCCCTGTGGGTA | |
| | CTGAGGGGAGGGCATCTCACCCAAGCCCCTTAAACCTGCTC | |
| | ACCTTCTTGAGAGGGCACGTGGCCGCAGGAAAGTCACAAAC | |
| | CCTTGTGGTCCCACAGGGGACACGTGTGCACAGGTGTGCAG | |
| | CTACCTTCTCTCTAGTTGGTACCTGAGGCTGCCTCCTGGATT | |
| | TTCCAGTCTCTGTGTTCCCAGACA[A/G]GCCCAAGCCCGAAG | |
| | AATACAAGAGGTCTGTCACGAAGCATCGGGCCTGTGGGTGC | |
| | ACTACACGTGTGCAGCTCAGGACCGCTGGGTGGGGCGTAAG | |
| | CTACCAGCATCCCCTTCTCATGGGCACCCTCATGTCCGGCTC | |
| | CCCATCGCTGGGCTGTGACCTGCGGGGGCGCCGCTCTATGG | |
| | AAGGGAAGGAGAAAAATTCACAGTGCTATCTACTCCTCTGA | |
| | ATGCACTCCCACCAATTTCCTTGGAAATTTCTAGCTTTCACT | |
| | GACATATGTGGGATGGGGCGGTGGTGACAAAATCA | |
| rs883849 | CTGGCTGGGGGACCATGGGTCAGGGCTGCCACCCCCTGGCTCTGTG | SEQ ID NO. 132 |
| | CCTTCACCTGTGTAACGAATGGGGCACTCACAGCCCCTCTCAAGTG | |
| | GTCCTGGGGATGAAGTGAGAAGGTGACATATACAAGTGAGTTATAC | |
| | ACGTTCCTGTTCTGTCACTCACCAGTGCTCACTGGGTGGGTCACTG | |
| | AACTCCCCTCAGCGTTTCCTTCTCCATCTGTAAACCACCAGTGCAA | |
| | ACCTTTCCCAGATAGTGCTGACCCGAAGCAGGAACCAGTGCCCCTC | |
| | TGCCCTCAGTAAGTCTGCCAGCAG[A/G]GGAAGCCCATAGAGGGT | |
| | CTTGGGAAATGAAGCCAACAGAGTCAAGAGGGTCAGATGATGAGGG | |
| | ACTTCAAGTGCCACCTTCATCCCATTCTTTCTGCAAATATTCACCA | |
| | CACACCTACGTGACCTCAGGCTCTGTGTCAGGTCCTGGGGATGTAA | |
| | TGGTGTCCATGAAGAAACAAGGTCCCTGCCCTCATAGAGTGGCCTG | |
| | ACATATGCCCGAGGCAGTCAGCAGCCGAGTGCGGGAGACTCTTGAG | |
| | CAGAGATTGAGTGTGTTGATATCTGTAGGCATCAGCCTGGCTTTGC | |
| | TGAGTGAGCTATATCAGAGTGGAGGAAGCCAGAGGCAAAGTCCAGA | |
| | CTCCACTGATCCTGGATTGAGGGGAGAAGGGGCTTGGCGGAAGAGC | |
| | AGCCTGAGCACCTGCATCTCACTCCAACTGGTGCTGATTTGTTCCC | |
| | AT | |
| rs213504 | TCCACAGGTTGATTATAATGTGTGTATTGAATTGGAATTT | SEQ ID NO. 133 |
| 6 | CTGTTGAAATTCTGATCCCTTCTAGACAAAGAAGGTAAAAA | |
| | TTGAAACATGTCAATGGATATCTAAATATCATTACTCACTG | |
| | GCTTTATTTGCAAATGGCTTTCCATTGACAACAGTTACATTT | |
| | TGTTCAAAGCAACAAATGATTGGGGCTGAGAATCCACAGG | |
| | AAGATGGTGCAGTCATTAATGAATGTGGTCATTATTCCTCC | |
| | CTGGCGGGAGGCATCGACTCCCGTTCTCCAGCCTGTTTTAA | |
| | GCAGACAGACCTACATCTGCACCTGTCAGCTTGGAACCCTA | |
| | GTAGGGGAGGGGGATGCTGATGTGATGGAGAATGAAGAAT | |
| | GGGCCCTGCAGGCTGACATTTTGGGAGAGTAGGTTCTGAAA | |
| | TTTATCCCAAAGGACATGGAATCCTGGAAGCAGGGTTCAAG | |
| | ATCCTCCCAAAATTGATGTCCCAGGATGCTTGGAATGATTG | |
| | TTC[C/T]GAGGGTTTTGTAAAATGCCAGGGGAAAACCAGGA | |
| | AGCTTCTCTCCAGTTGTGTTGCCTCCTTCCTCTCCAGTCTCC | |
| | ATGGAGCTGACTTTGAGAATTAACTCCTGAGGGACAGAGA | |
| | CCCTGGGATGGAGAGCCAGCCCTGCTGGATTCCACAAGGTG | |
| | CTGCTTAAAGCACAACACCTCTTCCCAATGACAGGTTCTGA | |
| | AAGAAGGCCTTGTAGCTAGATGCACAGAGGGTTTTGTTTTG | |
| | TTTTTTTTTTTTTAACCTTTCAGCATCTGTCTAAAATTGCTCT | |
| | GGGCTGGGTACAGTGGCTCCCACCTGTAATCCCAACACTTT | |
| | GAGAGCTGAGGCAGGAGGATGGCTTGAGCCCAGGCGTTCT | |
| | AGACCAGGCTGGGCAATATAGTGAGATGTCTATGTCTAG | |
| rs50057 | GGATCTGTGCCTGAAGCTGAGCTGCTGCAATGAAACTGACATTTCT | SEQ ID NO. 134 |
| | GCCTTGCAGCCTGGCCATGGGCTTAGCTGGACTAAAATGCTGCTGC | |
| | AGTGGTGAGGGCACGTGAGAGTCCCTAATGTACATGGCCTTGCTCC | |
| | TTGTCCTGACACATCTTTTAGGGCTGCTGCTTTCTCTAGTGCTGGA | |
| | ATCTAGATAATTCCTTTCCCAGCCGTTTGTTTCTTCAATCTTGGAA | |
| | AATATCTGGATGAATGTAACACTGTCACACAC[A/G]AACAGAATT | |
| | ATGACTTACGTCACATTCTATGTCGTGATTTTGTGGACTTTTAATA | |
| | ATTGCATTACATTTGTGACCATTAATTTCCACCATCGCCCTGCTCC | |
| | TGAGAATCTGTAAGGGACATTTGACACTCCTCTCCCCACCCACCTC | |
| | AACATTTGTGCTGACCTGAAGGTCACATTAAAAA | |
| KCP_4976 | GCAAGTTTCCCTGGGCTGCAGGAACTCAGGGACTCAGGGGA | SEQ ID NO. 135 |
| | CTAATAACAACAGTGTATGAGCTTCCGGGCACACTGCTTCC | |
| | CAGTGGCAGCCCCTGTACTTAGGGCTTTGTATGTATTAATTC | |
| | ATTTACTCCAATTCCCACAATAACCCTATAGGGTAGGGTTT | |
| | TATTATTGATTACCTTTTTACAGAAGAGGAGAGTAAGGCAA | |
| | AGAGAGATAGAGTAGTTTTCCCAAGGTCAAAGAGCACATA | |
| | AATGATAAAGGATGGATTTGAATGTAGGCAGAATGACCCT | |
| | CAATACAGACTGTTCCTACAGTCCACGTCCTCAGCCACTAG | |
| | ACCATACGGCCACTGGGATGATAGACAGACCAGTGGAGCC | |
| | ATGGATAAGGCAAAAACAGGGCTGGCTGTGTTGATCTGTGT | |
| | CTCTCAGAGCTCCATTCTTCCTCAAGGGGGCACCTTGCAAA | |
| | AAAAAACAAAAAAATGGGGCAGGGTAGGGAAGTGAAGGC | |
| | AGGAGGTCTTCA[C/T]AGAGCATAGCCACATGCTGCAGGCA | |
| | GACAAGAGGACGCAGGAGGCACCATTCTGTGAGAGTATCA | |
| | CAGTCTGACCGAAAGACAGAGGTTCACACTGTGTGATGGCT | |
| | TGATGGTTAATGTCACTCTGCCTTTTCCCCTTCTCAGGACTT | |
| | TGTAACCGCTCTGTCGATTTTATTGAGAGGAACTGTCCACG | |
| | AGAAACTAAGGTGGACATTTAATTTGTATGACATCAACAAG | |
| | GACGGATACATAAACAAAGAGGTAAGTGAGCTGGGGCCAG | |
| | GGGTGTGAGAGGGCTCCAGTGAAGGTAACTAACCCAACAG | |
| | AAAACAGCCCCAGGCATGAGGATAGCACTGTCTGAATGAG | |
| | GCAGGCTCTGCTTTGGGGCTAACAGAGCTGGTCCCTGGCAA | |
| | AATAAAGAAGGCCTCCCTCATTGCCCTACCCTGCGGTGTTG | |
| | CCAAGCGCCCAGAAAGGATTAAACAGATTCATTCTCACTGG | |
| | GTCACCTAGATTCAGTAGATATTACAC | |
| KCP_5077 | TAGGGCTTTGTATGTATTAATTCATTTACTCCAATTCCCACA | SEQ ID NO. 136 |
| | ATAACCCTATAGGGTAGGGTTTTATTATTGATTACCTTTTTA | |
| | CAGAAGAGGAGAGTAAGGCAAAGAGAGATAGAGTAGTTTT | |
| | CCCAAGGTCAAAGAGCAGATAAATGATAAAGGATGGATTT | |
| | GAATGTAGGCAGAATGACCCTCAATACAGACTGTTCCTACA | |
| | GTCCACGTCCTCAGCCACTAGACCATACGGCCACTGGGATG | |
| | ATAGACAGACCACTGCAGCCATGGATAAGGCAAAAACAGG | |
| | GCTGGCTGTGTTGATCTGTGTCTCTCAGAGCTCCATTCTTCC | |
| | TCAAGGGGGCACCTTGCAAAAAAAAACAAAAAAATGGGGC | |
| | AGGGTAGGGAACTGAAGGCAGGAGCTCTTCACAGAGCATA | |
| | GCCACATCCTCCAGGCAGACAAGAGGACGCAGGAGGCACC | |
| | ATTCTGTGAGAGTATCACAGTCTGACCCAAAGACACAGCTT | |
| | CACACTGTCTG[A/T]TGGCTTGATGGTTAATGTCACTGTGCC | |
| | TTTTCCCCTTCTCAGGACTTTGTAACCGCTCTGTCGATTTTA | |
| | TTGAGAGGAACTGTCCACGAGAAACTAAGGTGGACATTTA | |
| | ATTTGTATGACATCAACAAGGACGGATACATAAACAAAGA | |
| | GGTAAGTGAGCTGGGGCCAGGGGTGTGAGAGGGCTCCAGT | |
| | GAAGGTAACTAACCCAACAGAAAACAGCCCCAGGCATGAG | |
| | GATAGCACTGTCTGAATGAGGCAGGCTCTGCTTTGGGGCTA | |
| | ACAGAGCTGGTCCCTGGCAAAATAAAGAAGGCCTCCCTCAT | |
| | TGCCCTACCCTGCCCTGTTCCCAAGCGCCCAGAAAGGATTA | |
| | AACAGATTCATTCTCACTGGGTCACCTAGATTCAGTAGATA | |
| | TTACACAGTGGATAAAAATGACTTGTTTCAGTGTGAAGAGT | |
| | TACTCTTCCCTAGGGAACCTGCATTTGGGAAGGTTAGGAGC | |
| | CACAAGTCAAAGCTAAAAGTTGAAA | |
| KCP_2410 | TTGAAAGAGAGCGCTTTGGGGGGTTTTCTTACTGTATGTCT | SEQ ID NO. 137 |
| 99 | CTATTGCATGTTCTGTATTTTACATTTTTCTATTATTTCTTCT | |
| | CTGAGGTATAGTATTGAATGTAGAAAAATCCTCAAATGTTC | |
| | GGTATTAAGCAATACACTTCTAATTCATGGTTCAGAGAAGA | |
| | AAATATCTCGAATAAAAATAAAATAAAAATATGACTTATCA | |
| | AAATTTGTAGGATCTAAAGCAGTATTCCAGGAATGCAAGGT | |
| | TGGTTTAACATTCAATAATTGGTCAGTGTAATTAATCACATT | |
| | AATAGAATAAAAAGAGAAAAAATATAATCATTTCAGTGGA | |
| | TGTAATTGTTCAGAGCTTCTTAAAAGAAGCAACTCACTATT | |
| | TTACTAGATGATTTGTTTCTTCTGAATTCCTCTTTAAGGCTA | |
| | CAGGTGGTGCTTCTTACTTTGAACTGATCACTTTCTAGGTCC | |
| | CCACCCTTACTTCTTGTTTTTCATACCCTTGTAGAGTTTTCTC | |
| | CA[C/T]ATAGGAAACCCATGCTTGACATTTGCTCACCAGAGT | |
| | TACAGAGCTCTCAGGGAGGAGACTCAGAGTTCTAACCCTCT | |
| | TGCCCTCCTTTTTTCCCAGGACGACAACATCATGAGGTGTCT | |
| | CCAGCTGTTTCAAAATGTCATGTAACTGGTGACACTCAGCC | |
| | ATTCAGCTCTCAGAGACATTGTACTAAACAACCACCTTAAC | |
| | ACCCTGATCTGCCCTTGTTCTGATTTTACACACCAACTCTTG | |
| | GGACAGAAACACCTTTTACACTTTGGAAGAATTCTCTGCTG | |
| | AAGACTTTCTATGGAACCCAGCATCATGTGGCTCAGTCTCT | |
| | GATTGCCAACTCTTCCTCTTTCTTCTTCTTGAGAGAGACAAG | |
| | ATGAAATTTGAGTTTGTTTTGGAAGCATGCTCATCTCCTCAC | |
| | ACTGCTGCGCTATGGAAGGTCCCTCTGCTTAAGCTTAAAGA | |
| | GTAGTGGAGAAAATATGCTGCTTAGGTGGGCCCAGGCCACT | |
| | GCCTCCAAG | |
| rs189530 | TTTTTTTTCCCCAATCATGCTGTATTCTTAGCGTAATTTTAAAATA | SEQ ID NO. 138 |
| 1 | CTTAAAACAAGATCATGAGAAAATAAATGCCCAGATTCTAGCACCA | |
| | AAATTCAGAAGGGGGGGCTATGAGAATGAGGGGCGGGGAGAAGCCT | |
| | TCCTGAGAGTTTCTAAGAGGCATGGAGGCAGTGGGGATAGTGATTA | |
| | GCTCTGGGGGAAGAAGAGGCTACTGGCTGGAAAAGGGCATGAGGTA | |
| | GGGTTGGTAATCACCTA[C/T]TGTTTTATCTGAGTGCTGGTCACA | |
| | CAGATGTGTTCACTTTAGGAAAATGTATTGAGATTACACTTGTGAT | |
| | TTCTGCATTTTTACATACGCACATTAACTcagtcatatgctgataa | |
| | atgtttaacaatgggtttgctggagaaaaaagggtcccccggattt | |
| | gtaatgtctgcccatttccgtggtgtaaatactcccttcacaactg | |
| | atttcaagcttcccatgcactgtaactgaagacagagttgggaaga | |
| | tacgtgcagtagcacaacattaaatcatatttccaccatatacaca | |
| | caataggtgtaaataacacccagagcatagaaaa | |
| rs142275 | GGTTGGCAGCTTTTAATAACTTAGAAATGGCTGGGGGTGGGGGGGA | SEQ ID NO. 139 |
| 2 | GGAAGTACTGAATCATTTACTCATTCAGCAAATAACCAGGGAATAC | |
| | CTACTCTACACTGGTCACTGATGGAGATA[C/T]AGACTTGGGCAA | |
| | AAGCCGCGTCATCTGGTTGTGTTCAAGCTGAACATTCCCTTGACCC | |
| | AGTCACTGATGGAGATATAGACAGGCAAAAGCCACGTCATCTGGCT | |
| | GTGTTCAAGCTGAACAGTCCCTTGACCCAGGGCCCATGACAGGGCA | |
| | GAGGGCAtattattatccccattttacaaaggaaagagctgtcaga | |
| | CacagTGTCACACAGGAAGGTAGACGATAATGTCAATATCCCTCAT | |
| | CTTAGTATAAAGTTGTCCTTAAAAACTCTCCATTATTTATTAATTT | |
| | ATTGACTCACTTATTCATGTTTTCTGCACAGTGATACTTATCCTGC | |
| | ACGAGACTCTCACACCAGTGCTTTGGGTGTAAGAACACCCCAAGGA | |
| | TTGTGTTCCCTTTTCTCGAAGAGTCTGTGGTCTAAGGGGATTCAAT | |
| | GGGGTCCACTTTCCAAACCAAGACAGCAAAGGAACACTAGGAGAGA | |
| | AGTATTCTGTGCAGAGATTCAGTTAT | |
| rs142275 | GGATTAacaggcatgcaccaccgcacctggctaatttttgtatttt | SEQ ID NO. 140 |
| 4 | tagtagagatggtgtttcaccatgttggccag[A/G]atggtcatg | |
| | atctcttgaccttgggttctacccacctcagcctcccaaagtgctg | |
| | agattacaggtgtgagccgctgcacccggGCAACTGGTTTCCTTTT | |
| | ACTGCCACTTTCACTAACCGTGGTATTTCTCCATGGGCAGCATTCT | |
| | TGGCATTTGGGTGTGTAGGACTGTCCCTCACATAGTGACCTCTTAC | |
| | TCATGAATTGCCAGTGTCACATTCAGATTCTTATGGCAACCAGAAG | |
| | CTCCCCTGCTCCCAGCATTTCTGGACTCAGCCTGGGCTGGGGAGGT | |
| | TAGCTCAGACCAAATATCTCCTTTCTGCCAGTTGCTCTGCTAGGCC | |
| | CAGGTCATGCTGAGCAGAGCAAGATGTAGCTGAAAACCAAATAAGT | |
| | CACGTGTTCCAGCTTGCTGGGGTTTTGTGAAGAAAGCAGCCACCCC | |
| | TCCAGTCATATAGTTTGCAGGTTGGGATTTGCATT | |
| rs205560 | tggctattgtcttaagctactattaccttcttgcttgtcaagttgc | SEQ ID NO. 141 |
| 6 | gcatttacttttcaaggcttgctacgtgcctggaatttctagattt | |
| | tcctttatttccatgcttggggagaggagtgcctggcaggctccta | |
| | agaggggtctgtgctccatctcGCCCCCTATCTTGAACTATCGGTT | |
| | GGGTGCTCTAGAATCTGTATGGGGTGGAAGTGTTCATTCATTTTCT | |
| | GTACAAAAGCAATCAATGCTTATTGTGGAAAACCCAAATAAGAGAG | |
| | TTGCTCTAAACAACACCCTCCCCAGTCCCAATACCTTGTCCAGAAG | |
| | AAACCACTGTTTGGTGAGTATATTAGT[C/T]AATGTCTGCAGACC | |
| | AGATCGGATGACCAAGTTTTCCATAAATGGATGGCCATCCACTTCC | |
| | CTTCAAGGGCGAGGGTAGTTTGTTCTGATCCATCTCCCTGTTTCAC | |
| | AGCTCAGGGAGGGAGGAAGACCCAGGAAGGAGAGCTGCCACAGTTA | |
| | CTAGTGGCCCAGCTGGGATTTAAAGTCCGCCGTGACTGAAGCTTGG | |
| | CTCCACATGCCAGTCTGCAAGGCCCTGAGTGCCCTCAGCAGTAATT | |
| | CCAAGCAAAGCAGGGAGCAGCGGGCCAGGTGCTGAACTGAACTGC | |
| | TGCTCAGGGCTCCTG | |
| rs933656 | CTGCATATGTTCCCCCAGGTATTTGCCCCCGAAGCACAGTCATCTC | SEQ ID NO. 142 |
| | ACTGCCTTGCATAGTGGAATGCTAATCAGCAGAAGACCCTTCTATG | |
| | GGAGGCAGCTTGGAAACCTGGAGGAAGCCCTGGCTGAGGAGGCTAG | |
| | TGGTCAGGGAGCCTATCCTGGCCAGGTCACTTTTCCCCACTGGGGC | |
| | CTCGGTTTCTTCTTTGTAAAGGGAGAAACTTACATTAGGCATTTCC | |
| | TCAGGTTCCATTTGGTTCTCAAATTCTAATATTTTTATGGTTGATG | |
| | CTCTCACCAGAGCTGCTGCTATGATCTCAGAGACGTGAGGCTCAGA | |
| | TCTAATTAGAAGCAACCGGAAGAGAGCAGTTGGGATTTTTCAactc | |
| | aggaatcagtctccctgctgggttcaaattcaggctctgccactta | |
| | cagctgtatgacTAAGCCTTGTTTTCCTCAACTATAAAACAG[A/G] | |
| | GATAGTAGTAGTTACCATCTTAAAATAGCTGTTGTGTTGTGTGGA | |
| | TTTCAAGGATCATGCAAGTCAAGCATTTAGCACAGTCTCTGCTACA | |
| | TAAGTGGTCAGCAAATTTGAGGTACTATTC | |
| rs233909 | AGACCCTTCTATGGGAGGGAGGTTGGAAACCTGGAGGAAG | SEQ ID NO. 143 |
| 1 | CCGTGGCTGAGGAGGCTAGTGGTCAGGGAGCCTATCGTGGC | |
| | CAGGTCACTTTTCCCCACTGGGGCCTCGGTTTCTTCTTTGTA | |
| | AAGGGAGAAACTTACATTAGGCATTTCCTCAGGTTCCATTT | |
| | GGTTCTCAAATTCTAATATTTTTATGGTTGATGCTCTCACCA | |
| | GAGCTGCTGCTATGATCTCAGAGAGGTGAGGCTCAGATCTA | |
| | ATTAGAAGCAAGCGGAAGAGAGCAGTTGGGATTTTTCAactc | |
| | aggaatcagtctccctgctgggttcaaattcaggctctgccacttactagctgtatgacTAAGC | |
| | CTTGTTTTCCTCAACTATAAAACAGAGATAGTAGTAGTTAC | |
| | CATCTTAAAATAGCTGTTGTGTTGTGTGGATTTGAAGGATC | |
| | ATGCAAGTCAAGCATTTAGCACAGTCTCTGCTACATAAGTG | |
| | GTCAGCAAATTT[G/T]AGGTACTATTCAATTTATGGCTCTAT | |
| | TGTTTGGGGCTTCCAAATGTCGAGAGTAAGGCCATTTTCGA | |
| | AGTAGGCAGTACATCTGAGAGCGTTAACAGGTCATTTCTGG | |
| | AAACCTTATGCAGCCCTATGCAGATAACTAGGACCAAAAAG | |
| | CCCAGCAGAGAGATGCTCGTCCGTTGCTTGAACGCTCAGTG | |
| | ACCTCTACTCTGTGGGTTGTGCTGAAAACATCAAAGCCTGC | |
| | TCAATTAAAATCCTGAATGCCTTGATAATACAATTTAGAAA | |
| | CATACATAGTTTTTAAATAGGGCAAAAACTCTGCATGATTA | |
| | GTGCTGCAAGAAGATATCCAGCCGAACCTGGGTGTTGAGGG | |
| | AGCGGTCTCTAAAGGCAACAGAAATCTAAAGTAATTTAAG | |
| | AGCCATGCCACTGAATAAAAATATTCAGGTTCATTTCCTGT | |
| | CCTTCTCTCTGTTTGGGATCTTTGTGTGTCTTTAATTAAAAG | |
| | TAGGAGAGGCCTGCTTTT | |
| rs186233 | ACTACTTCTAAAGCCTCTTAGACCCTGGTAATCTTCCTCCTAACAC | SEQ ID NO. 144 |
| 1 | CATCGGGTGACTGCAAAGCACTGCAGGCCAGACTTCAGTTCTGCTG | |
| | TGTAATTTGCAAGCTGGGTGACCTTCCTTATCTATAGAATGGGCTC | |
| | T[C/T]CTGCATGGCTGGCATGAGGAATAAACAAAATGGTTGTGTC | |
| | CAGTGCCTGGGGCATAGCACAGCTCAAAAAACTTAGTTCATCCTCC | |
| | TGAGGGATCAAGAAGATACTTGGAAACAAATGTCCAAGGGCGTAAT | |
| | CTTGAAGGGGCTTGTGCCAGGCATATATGGAGAGAAGGGTTTTGTG | |
| | GGATGTCAGACTTAATAGTGCCCTTTACTCCCCACCCCCGTCTCTC | |
| | TGTTCATAGACAGGAAATCTGTGGCCTATTCTGGGACCTCAAAGTG | |
| | CCACAGGGTTAAAGATACCAAGTCAGAAATCTAAGGTTCTAAATGG | |
| | ACTTTAGACCATTTTTCATTTGGGAAGGAAGAATTCTTTAAGGGGT | |
| | TGTGCTGGCGCTGTCTCTGTATGCATGTGCAGAATGTGCTTCCAGA | |
| | TGGGGTAATGGTCTGAGTTTGAGGACAGAAGTCCACTCCACTGCAT | |
| | TC | |
| rs233913 | GGGTGTGGCCTTTGGACAGCACCTTAGCAGGAATGTGGTGG | SEQ ID NO. 145 |
| 9 | AGAGCAGCGCCATTCACTCCAGAGGAGAGCCTCAAACTGTT | |
| | CAGGCAGATGTAGCCTAGGTAGAATGTTGGCCTGGCGCCTC | |
| | CGGGATGACAGGTGCCATTGCCCAAGAATGGGGAAAAGGC | |
| | TGAAGTGCTCCAGCCAAAGACCCCAATTTATCTTCAGGACA | |
| | ATTTTCACTGGAAACCTTGCCTCACCACTGCCCACTTTTTGA | |
| | GAAGTAATTAGAATGCTAATGTATAAGAAAGATGACtattaaaa | |
| | ataaattaataataGATAATACATTTTGGCTTACAATTTTGAATAAT | |
| | ATAGCCATCCCATCTTAAAGTAAAAATTCATATATTTTTAAT | |
| | AAGCCTGAGACATGTTTTCCAATGAACCACAGATGGTTCAT | |
| | TTTTATTATCCTATAAAGAGACATTATGGGCAAGTGTTTTTT | |
| | AAAATGGTAAAACAGAACCTTAGAGCAGCTCTCTTTTG[A/G] | |
| | AGATCTCTAAGCAGTTTCTAAGCATCAGGACCCCCTTCTGT | |
| | CATCACAGAGAGTGAAATGAGGAGATGGTCTCTGTCACCCC | |
| | CTGACTCACCAGTGAGCCCCAGACGTTCATCCCTGATCAGA | |
| | TGGAAGCAGTGTGGCATGATTACAGTTCATATTTCAACTCT | |
| | GCCACTCAATGACTAATAGCCAAGCACTAATAATGCAGAA | |
| | AATGTAAATTTAAAAAATAATCTTCCTGAGATTGGTTATGA | |
| | AATGCACTCAACACAGCACCATCCACAGAGAGGTTCTTTTT | |
| | AATTGCTCTTTTCTTTCCTCTCGACACCCAGAATCACAAAGC | |
| | ATGCCTGAAAGCGTCACACATATATGTCTGTGACCATAACA | |
| | TGGCATTGCACATGCAAAGGAAATAAATAGGTGTTACCCAT | |
| | GTGACAAAGGTCCATGAGCTCTGTCCGCAAAAAGCTGTTGA | |
| | GTTTAAAGAACAAATAATTCTGAAAAATCTTCCAG | |
| rs872435 | CTGCCATTCTGATCACTGCAAGACCCCCACCCCCAATACTCCCAAT | SEQ ID NO. 146 |
| | TGTACCACCCCACCCCACTCACCAGTGTCTCAGAAATGCCTCCTCC | |
| | AGAAGGAAGGCATCCTGTCTAACCCACTGCTTCTAGCCAAGCTGTC | |
| | TTTCTTCAGAAGGTAGAAAAA[G/T]ATTGTTAGTCATTGTTTAAT | |
| | CTTTATTGAGTATATACCGCCACACCAATTGCACTGCCATTCATTA | |
| | TCTCATTTAAATCTGACAAGAGCCTTGTAAAGTAGGGATTATTCCC | |
| | ACCATTTCCCAGATGTTGAAACTGAAATTGATAAACACGACATGTT | |
| | GCCATGGCTACATGAAGATCTCCAAGCCGGAGGATCTCCACCCTCA | |
| | CCTGCCTAGCTTCCCAGACCTCTCTGCAGAAAAGGGACTGACCCCC | |
| | AAGACAGCCCTGGCCTCTGGGCTCCACCCCTTCCACATCCATCCCA | |
| | GGGCCGCTGAGGACTCAAGAGTTCTCCACGTTTGCCCTTTAAAGTG | |
| | ACTTAAAAATAATCTTTATGAATTTCTTCATATACAAAATTTGTAC | |
| | TTACTCATTGCAGCAAATTTAGAAAATACACATAAGCAAAAAAGAA | |
| | CGTAACAGCCATCCATAACCCTAACTCTCAGAGATCACCACTATTA | |
| | AAATGTTTATTATCTAAGAGAGAGATGATATAGACAAAGATGAGAC | |
| | AGATTGACACAGACAAGATGGGTACATGATAGATATTTTCTGTGTT | |
| | ATAACCCTTGCTTTTTCTTGCACTTTCTAGAATTTTTCTGAGAACT | |
| | AATCTGAAATCTGCACAGGGTCCCCACGTTTGGATCCTCTATCCCA | |
| | TTGCCTTCCA | |
| rs329468 | AGCTGAGCCCCAGGGCTCCCCCATGAGTGGGGAGGAAACT | SEQ ID NO. 147 |
| | CATGAGTGCCTTCTATATGGCAGCGCTCTATGTGCAGGGGT | |
| | TCTTTTGATAGCAGCAGACTGAGAGATGATGTTACTGTCCC | |
| | CTTTTTCCTGTTGTTGGCAACTGAGAGTCAGAGGATGGAAG | |
| | TGACTTGCTGAGGTCCACCACCTGTTCAGCTGTGGAGCTGC | |
| | GACAGGAGCCTTTGTTTGACTTCAAAGCTCACCATCACTCC | |
| | TCTCTCACTGATGCTCAAGTGGGCTATCACCTCGCCTTTCCT | |
| | GAGCCTTCGTTCGCTATCCTAAAACAGCGCCTGCCGaaatcacca | |
| | ctaaagaacttattcatgtaaccaaacaccagcggttcccctaaaaacctatggaaataaaAATT | |
| | AAAAATAAAAACAGTgcctcccatgacccatgtctctccagtcccataactctgctct | |
| | atttccattcacagctccatccccacctttatgtcttttgttcactgctttatccccagtgcctagaagagt | |
| | gcttggcacctagtagacactcagtaagtatttgtcgaatgagttaatAAGGTTGTGAAA | |
| | AGAACGTTAGATTACTGGAAGGATTCATCTGAGTTTAATTC | |
| | TGCTATGCTGGGAATCCAGTGTGCGGCCTTGGATGA[A/G]G | |
| | CCAGTTCCCTCCCTGGGCCCCAGTAGCCAGATGTGTACATT | |
| | AGAGGGCAGGAGAAAAGCCAGACGCTCTGTGACTTATAGA | |
| | ACTTGTTGCCCAGAGTGGAGGCTGCTTTGATGCTGAGAAAA | |
| | AAGAAAGAAACATGGAAATGCTAAATGGGTGGCAGAGAGC | |
| | TTGAGGGAGGAAGGAGATGGGGAGGGTACTCTTGAAACTG | |
| | TTTGGTGTCTTCCCTCCTGCCCCGTGAGTACCAA | |
| rs50364 | GCCTGACAGATTTTTACTGAAGGGGTGCACATTGGAATAAAAAAGT | SEQ ID NO. 148 |
| | GTTACCTATCTGGTTGAGTCTTCAGCTTCAGAAAGGTAATAGAGCA | |
| | AAGGCAGATAAATCCAAACAGGGACTGAGCTGTTTTCATGCAGGCT | |
| | GCCTTGGTAGCTCTCCAAAGCCTTCAAAAATGATGAGATTTTTTTT | |
| | TAAATCCTTTTTATCC[A/G]GTTGTTCTCAAGGGATTCCACCCCT | |
| | GCATAGGAGAGCTCACCATTCCTGGGATCTTCAGCTTCTATGCCTT | |
| | TGCATATGCTCTTCCCTTGTTCCctcattcttcaacactcaactga | |
| | attatcacctcccttgaagccttctctgacatcccTTCTAGTCCCA | |
| | TGCCACCCAGGAGGCACTAAGAGCTTCCTCCCCTCAGCTCCCAGTT | |
| | CTTAAACATGTCAACACTGTTTTGAAATGATTTGCCAATGAAAAAT | |
| | TCTAGACCAGCAACCAACAAcatccttcccaaaggtgtgttatata | |
| | tggtacatgctctatgtgctaaacaccaaattcattgataacagct | |
| | aagaaccaggaaacaaaccatcgttaattatggcatctcttgaaaa | |
| | atctaaagatctggactcactgggcttaaatgactgcatgataaca | |
| | actggttgagtaacaactgtttccctttcatggagcagttactctc | |
| | cagttctcagttcctaccactctctatagttgtacactcatcatct | |
| | gtcctcatctgaattacctgccaatgactactggcatttgagtttc | |
| | taatccatgGTCTATGTGTATGCCTCCTCACCAGTGTGAGAACTCA | |
| | TGTAAACAGGTATTATGTCTTTTCATCTCTCTCCTAA | |
| rs155158 | ATAATGGTCACGTTGGAGCAATTGCCATTTCAAATCATTAG | SEQ ID NO. 149 |
| 3 | GAACACTCAGGTCACTTTGGCATGGAGCTATTTTGTAAAAG | |
| | ACGTAGAAGCCATTTATAAACTTTGGTTTGCTTTTTAAAAT | |
| | TTATTTCATTCTGAGGCTTATCCGTGTAAAATTACCAAAATG | |
| | ATTGTGGTTAGACTCTACATTGTCACAGTATTTAAATGTGC | |
| | ACAATATTCCACTTAGAAATAATGTCAGTAGTAAAAGTAGT | |
| | AGAGGGCTTTGATAGCAATATTAATACATCGTTAAGCCCTT | |
| | CTCATTAAACAGTGTAATAGTCTTGTTGAAGTTTGTTAGGC | |
| | ATTTTAACCACTACTAATTAAAAATAGACCTACTGACTAGT | |
| | CTGTTTTACTGTGCTTTATTGTGTCTTGGATGTFCATTCAGA | |
| | TACTTTTGCTGTTGAGAAATCAAATCGTCTCTTATGGTTTTA | |
| | ATTACAAAATACATATTAGAGGGATACAGTTCTTAGGGCTG | |
| | TGATTTTTAATTTGTGTAACCTTTTTTTATTTTGGAAAGGAA | |
| | ATTTCAGATTTTTTCTAGTAATTTTTCATTTGTGAGTGTTGTT | |
| | TTCTAGATACAGAAAATGTACCTAGATAGATCATCACATTT | |
| | TAGGATATTTTGCTTACGTGTTATTTTATATTTATATACTAT | |
| | AATACCATTGTATAGTTCAGAACAAGAAAATATCTTGATAA | |
| | ATCATCTGCTACTGTGAGGCAGTTAAAAAAATTTGAGGCTC | |
| | ACTGAAAATGTGTGACTTGCCGAGTGTCTCATATTGCTAGT | |
| | ATTGGAGAGAAAACTAGAATCTAGGCCTTTATTTTCCTGAT | |
| | GTAATGATTTTAGCTAATTATTATTTATTTTCTTAAATCATT | |
| | GCATTAATT[C/G]ATTTTTCACAAGTAGAGCCTATATCAGTG | |
| | TTTGCaataauaaattttaagtatautctataattgtaaataaaatCCTGACATTTGTT | |
| | ACAGGATGGGGTTTTCTTTCATCatatttttataataaaaattaaGCAGTT | |
| | ATAAAAATAAATAGCCTAGTTTTTCAATTGGTATAAGCTGG | |
| | CTTTATTTTATACTGCTAATAAAGGCACATTATGTTCAAGCA | |
| rs145769 | CttatatattcattaattaataatttatattCACACAATGATTGTA | SEQ ID NO. 150 |
| 2 | GAAATGTGAGTGTTTCTTAGATTACCAAACATCTGTGAAATCGTGA | |
| | AGGAGTATTGAAATTTAGTAATTTGGTTTGGATCTTTGAAGATATT | |
| | CTGTAGAATTGTTTTCCAAAAGTTACAACTGGTTTACAATTTTTTT | |
| | CTTAATTGCCATTAACAAGTTTTGACCCTGAGATGAGAAATTATTC | |
| | ACAAATTTCAATTAAATACTGGAATGCTTCATATTTTCTGTACTTT | |
| | AGGAcagggatccccaacccccaggccacaggttggtactggtttg | |
| | tgacctgttaggacctggactacatggcaggaggtgagcggtgcgt | |
| | gagaa[A/G]cattactgcctgagctccacctcctgtcagcgacag | |
| | cattagattctcataggaggacggaccttattgggaacacacacaa | |
| | gagatctaggttgcggactcctcatgagactctaatgcctatgatc | |
| | tgaggtgggacagttttatcctgaagctcccccactatccgtccag | |
| | ngaaaaatttggtcccttgtgccaaaaacactggggacctctgCTT | |
| KCP_1035 | AGGGCTGGGCGTCCCCCGCCCCCACCGTGCAGCCCTCGCCCCCGCC | SEQ ID NO. 151 |
| 5 | CCGCCCCTCCGTAGTTGCCCGCCCGCCGCCCCCTCCGCCGCCCCCT | |
| | CCGCCGCTCCGACTCTCGCCCCGAGCGCTGGCAGCAGGCAGCAGGC | |
| | AGCAGGCGGGCGCGCTGTGGCTCCGCGCCGCGCGGTCCGGGCTCTG | |
| | TTCATTCATGATTGGTACTCGGCCCTCCGAGACCCAGCCCGAGCGC | |
| | AGGGAGGGGAGCCGAGTGTGCGGCAGGAGGGGCGGGCGGACGGCGG | |
| | CTCCCGCACCGCACGCGGCGCTGGCTCGGCAGCCTCGGCCGGGCGG | |
| | CCGCTCTGGCCCCGTGTCCAGTGCCAGGCAGGCTTCAGGGCACCGT | |
| | CCTCGGCCCTGGGCGAGGGAACCGCCGGGCCGGGTCCTCGCGCGGG | |
| | GAAGCGGTTCCGAAGGCTCGCGGGGAGCGGCTAGCCCTGAGTCCCT | |
| | GCATGTGCGGGGCTGAAGAAGGAAGCCAGAAGCCTCCTAGCCTCGC | |
| | CTCCACGCTTGCTGAATACCAAGCTGCAGGCGAGCTGCCGGGCGCT | |
| | TTTCTCTCCTCCAATTCAGAGTAGACAAACCACGGGGATTTCTTTC | |
| | CAGGGTAGGGGAGGGGCCGGGCCCGGGGTCCCAACTCGCACTCAAG | |
| | TCTTCGCTGCCATGGGGGCCGTCATGGGCACCTTCTCATCTCTGCA | |
| | AACCAAACAAAGGCGACCCTCGAAAGGTAAGCCACCTTCTTCCTTT | |
| | TGTTCCCCTGTCTGGGCTTGGGGGTGCTAGGCGCCGAGGTGGGCTG | |
| | TGCCACCTGCCTCCCTTAGTCCGGACTCTCCTCTCCACGAGGAGCC | |
| | CGGACAGGTGCTTGTATCCAAAGGAGAGAGAAATCGGCGGGAGGGC | |
| | TGGTGTGAACACCCAGAGGAGGGAGCCGGAGTGGACGTCTGCCCCA | |
| | GCGGCAACTGGACCCCTCTGGGGCACCAGGTGTCGGGACTCTCCTC | |
| | CTGGGGAAATCTCTGAGAGCCGAAGGAAGCGGCA[A/T]GTTCACA | |
| | GGTGGGGGTGACCGGATTCTCTGGTGGAAGTGTGGTGAAGCTCTTC | |
| | CCATTCCCATGACAGCTGGCGTTTGAGCACTCAGTGAGGGTGCTGC | |
| | CACACTCCCACACTCCTCCTAGGCGGCTATGCCAGGTGCAGACCTG | |
| | CGAGTCCCTTCATCAGGAAGAGTGCTCTGTCTGCACCCCCAAAACC | |
| | TCTGCAAGCCAAAAGGAATCAGCTGCTGCCAGGGGTAAAACTCCCA | |
| | GGCCTCATGTCCTGGTGGCTCCGGGAGTCAGGAGGAGCAACCGTGA | |
| | AGGGCTGGCTGCGAGCTGAGCTTACATCAAGGATTAAAAAGCATAA | |
| | TATCGTGGAGTCTCTTCTGCCTGGACGCTGTTCCTTCACCACCTGT | |
| | CCCCAGCCGAGGCATGGCTGATCTCACCATCCGTGGGAGAGTCCTC | |
| | AAATGGGTCCAGGTGAAGTTGGAACCAGTGTGTTGGGCCCTGGAGG | |
| | ACAATGCAGGTCTCCTTACCAGCAGTTCAAAAGTTAGTGGTTGGAA | |
| | TAAAGAGACTGGAAGCAGTTAGGAAACGGGAAATGATGGGTTTTGT | |
| | TTTGTTTAATGTTCAAATGTCACTACGAGTGGTAAGATTTTAAGCA | |
| | GCTTGACACTTAAACATTCAAATTCTACCATCAGAGCCCCCATCCT | |
| | GGATACAGGTGGGAGTTAAGCTCCTACCCTACAGGCCTGATAGTGA | |
| | GTAGAAGTGTAATGGGGTAAGGGACCCCAAGTGAACAATAAGTCTC | |
| | CTCTTAGAACTTGGTTGGTCTCACCCTGTTTAGAACCACAGAGATC | |
| | TCCATAAGTAAGCTGTCCTTGAAACCCCCTGGAAGAAGGGGTCCCA | |
| | GCTTCTGGCCCAGCTCCCAGGGGCATCAGGCTGGCTGAGCCCCGAG | |
| | GAAAGAGATCTCTGGGTGCAGATCTTAGGTGCTGAAGCTGGGTTGG | |
| | CATTTACATCCTAGAACATAGGAAGAGGCTTTGGCCCATTTGTCCA | |
| | GCTGAGTTACATGTCCTGCTGGCAAGG | |
| KCP_1044 | TGGGGGTGCTAGGCGCCGAGGTGGGCTGTGCCACCTGCCTCCCTTA | SEQ ID NO. 152 |
| 6 | GTCCGGACTCTCCTCTCCACGAGGAGCCCGGACAGGTGCTTGTATC | |
| | CAAAGGAGAGAGAAATCGGCGGGAGGGCTGGTGTGAACACCCAGAG | |
| | GAGGGAGCCGGAGTGGACGTCTGCCCCAGCGGCAACTGGACCCCTC | |
| | TGGGGCACCAGGTGTCGGGACTCTCCTCCTGGGGAAATCTCTGAGA | |
| | GCCGAAGGAAGCGGCATGTTCACAGGTGGGGGTGACCGGATTCTCT | |
| | GGTGGAAGTGTGGTGAAGCTCTTCCCATTCCCATGACAGCTGGCGT | |
| | TTGAGCACTCAGTGA[C/G]GGTGCTGCCACACTCCCACACTCCTC | |
| | CTAGGCGGCTATGCCAGGTGCAGACCTGCCAGTCCCTTCATCAGGA | |
| | AGAGTGCTCTGTCTGCACCCCCAAAACCTCTGCAAGCCAAAAGGAA | |
| | TCAGCTGCTGCCAGGGGTAAAACTCCCAGGCCTCATGTCCTGGTGG | |
| | CTCCGGGAGTCAGGAGGAGCAACCGTGAAGGGCTGGCTGCGAGCTG | |
| | AGCTTACATCAAGGATTAAAAAGCATAATATCGTGGAGTCTCTTCT | |
| | GCCTGGACGCTGTTCCTTCACCACCTGTCCCCAGCCGAGGCATGGC | |
| | TGATCTCACCATCCGTGGGAGAGTCCTCAAATGGGTCCAGGTGAAG | |
| | TTGGAACCAGTGT | |
| KCP_3858 | TCAAACTTTTCATTTGCTCAAAGCCTACAGCAAACTCAGTCCACAC | SEQ ID NO. 153 |
| 9 | ACTTGGCTATACAAGAAAGGTTGCTTTCTTTGTTGTTCTATAACTG | |
| | ACTTTAATTTCAACTTCAAGTCCCCATTCTTGCCAAGGGGTAGAAA | |
| | TGGAATCTTGGTCAACTTAGGTTCCCCTCCCTACTCTCTGGGGTTG | |
| | CATTTCCAGGCCAGGCAGTTTCTGCTGGTGCTTTTGTTCCTTGGTC | |
| | CTCAGTCTTCTTTCTGTGTTGACATCCATTGACATGTCCTCGACTC | |
| | CCCTCATCTCAGATCACAGGCCCATGCTGACTCCAGGAGTATTCTT | |
| | GTATTCTCTTCATCTGAACCTCAACACTTTTTGAGACCACGCATGC | |
| | ATGTGCTCTCTCTTTCTCTCTCTCTCTAACACTTCTGGAACACTCT | |
| | TGGACATGAGGAGATATTGGTCTTTCTAGGATGGGGTCAACTGGCC | |
| | CTGCCTCAGATCCATTGGCCTGTACATATCTTGTAGCCATTGTGGT | |
| | GCCATGGATCACAGGTCACGATGCTGTGTGGCTGCCTCTGCTCTTA | |
| | GACCTGCCCCCCATGCCACCAGAGGGAGTGTCTGCCTCCCCCTGCC | |
| | CTGGACACTCAGCTGGAGGGGAGGGTCACAGTCCCTCACAGTCCCT | |
| | TCTCCAGTGACAAGCAACAAACTCCCAGTCTTCCTTTCTTTCTGAT | |
| | CCTCTCCTCCTCTTCCTCCTTCTCCTCTTCCTCCTCTCCCAGTCCA | |
| | AGGAAGTTTTATGCAAAGGCCAGAGGAGGGAATAATGAGGTGGAGG | |
| | TCTCTCTGACCAACCATGTAGCCTTCCGGATCTGTTGTGCTTTCCA | |
| | GGAGTCCTTCAAAGCTCTAAGCTTTTGGAATTCTGCAAGCTCAGGA | |
| | AATTGAAAACCTTTTCTCTCACAACTGCAGGTCTTTCTCTGCAGTT | |
| | GTAAAAGTCTGTTTAGAAACTCAGGAGACAAGCAGCATCTTCTTTG | |
| | TTCCCTGCTTTCTGGAGGCAGTCAGCGTGGAACA[A/C]CCTGCCT | |
| | GCAGTCTGACTCAGGGAAAGGGTCACTGAGTGTGTGTGTGTGTGTT | |
| | GAGGGGTGGATAATAAGCAAGGAGAACACTCAGACAGAGAGCTCAC | |
| | AGAGGGGCACCCCAGCACCTCCCTCACCTCTATATTCCCCGCCTGG | |
| | GCATAGTGGAGGAGGGTTAATTGCCAGCCAAGTTTAACAGGCATTT | |
| | CTGATTCGCGGCATTGTTGTTGCGCTATCCTGCAATCCTACGCTGC | |
| | GGGTACTGTTTTTATCCTGATCCTTCAGCTCTGGAAACTAATATAG | |
| | AGAGCTGAGTAACTTGCTTGAGGCCATCATGCCAGGATCCACGGTG | |
| | CCCCCAGGCTGAAGAGCCTTAACCACTGGGCTGTACCACCTCACAG | |
| | GAGGGCAGGTGGCACAGTGCCTGGAACTTGGGAGGGTCCAGCACGT | |
| | GGAACTATGCTCTGTCATTTACTTACTGTGTGTCACTGGATCAGTC | |
| | ACTCAACACCGCTAAGCCTCATTTTCCACCTCTTCAAAAGGGATCT | |
| | AATAAACCTGTTAGCAGAAGGCTGCTGTGAACACTAAATGAGGTGG | |
| | CTTAGGTGAGAGCTCTGGTCTGAAGATGCTCACACTTTGAATCTCA | |
| | AGACTTGTGTGAACCAATATCAGATTTCTCCTATTAGATTGCAATT | |
| | CTCAGGGAGTCACATTCCGTCTCCAAATGCCCATCTCCTGATCCAC | |
| | AAAATGAGCACAACATCTCTGATAAACGGTAACTAGATGGTTCCAG | |
| | TGGGCAGCGGGAGTGGGAGGGCGGTTGACTGGGCCAGAACCTCAAA | |
| | TGTATTCCTGTGTAGTTTCTCATGCATTCATTCAGTTTGGCACCAG | |
| | AAGGTGCCCACACTCACTTTGCAGCCAGTCTGTCCCCATAGAGGTG | |
| | ATAAAGGAAAAACATATGCACATTTAAACTTTTAAAAGTTTATTTG | |
| | AACATTCAGCGATTCACAAACGGTATAGCACAGACAGCAAGCAACT | |
| | AGCACTCCTCTAGGAGGGGCCAAACAG | |
| KCP_6519 | ACAGAAATCCTTAAGAGCATCAGCCGTGACACAGAAATCTAATACA | SEQ ID NO. 154 |
| 9 | ATAAAACAAAGTGCTTATAAACCCCAGAGTTGTTTAAAACCCAGAA | |
| | ATTCCCAATTGACATATGGGACTATATCTTCTTAGCCCCTAGTAAA | |
| | CTGAGTGGCTTCAAACAAGTCCCTATCACCTCCCAGGGCCTCAGTT | |
| | TCTTCACCTGTGAAATAAGAGGATCAAAAAAAGATAATGTTCTCTC | |
| | TGTTCTCTTCCAACCGAGGCAGGCATCTCAAGTATTTCTTAGTCAG | |
| | TTCTACTCTAGGCTACACAGTATCTGTATCTGGCAGCTGTATGAAC | |
| | TACTGTTCAAAATCCTCTTCCCAATCCCAGTTTCAACATCACTCCT | |
| | CAAGGCAGCATCCACCTTCACTCTAGACTGAATTAATTCCTCTGTC | |
| | TTACCACCTAAACTCCTCTAGAAAACTTGATACAGGTAAAGATAAA | |
| | TGCATTTTTTCAAAAATTCTACTTTTCTAGTCCCAAGGCATTGTGT | |
| | ATATCATTCTTATGTAAGTTATCACAATAACCCATAATTAGTTAC | |
| | TTCCATTTATGTCAAATCGCCTACAAAGCAGAAACATGTATTATTC | |
| | ATTTTTGGCTTCCTCCCCAGTATCTAGCATACGAACTGTTTGCAAA | |
| | CATGCCCAGTTCTTCAAACTTTGTAACTTCATGCCTTTTCTATCTA | |
| | CTACTTGGGATGGGCCCACCCTCCCTTTGTCCTCTAAGCACACTCC | |
| | TATTCATCCTTCAAAGTCCAGCACAAAAATCCCCTCCTCTGTTAAA | |
| | CTTCAACTGCTCCAGGCTGAGTCTTATGTTTGGGTCCTTCATACGT | |
| | ACCCCTCTTCTATTGTTTGGGGTATTGTGTGCTGTGGGATCTGTTT | |
| | ACTCTCAGTTCTCCCCTCTAGGCTGGGTTCCTTGAAAAACACCCTC | |
| | TGGACATTTCACCTCTACATCCTCTGCATTCTTGGCCAGGCTCTGA | |
| | GAGGGCATTGGTAAATGTTAACTGCCTGGCAATG[A/G]TGATGCT | |
| | GTTAACCTGATGTGTCAGGGGTCTGAATAAAGCTGCCTCAAGGTAG | |
| | GCAGATGCCCACAACCAAGCAAGAACTCAAAGCTGCAGGCTCCTCA | |
| | GCCTGAACCTTAGACAGCGTCTTGGTCACCATTTCAACACCTTGAC | |
| | CACATTTCTCACTCTCCCAAATTTCCTCCTGCTTATTCCTCATCCA | |
| | CATACATAAGGCTGTGTCTCCCAGGGGAAATTCAACTACTTGGTAA | |
| | TTATCCTGCTTCTTAAGTTTGGGGCTAGGGGATTCATAGATGATGT | |
| | TCAGTATTATGCTGTGCAATGTAGATGCTTCCTAAACCTTCTCAGG | |
| | AGCTACCACTGAGTGGCACCTGGGGACCTCTCAGGAAGAGCCAGTT | |
| | TTCTGGGCAGTGTGGGGCAGGACAGAGCTCATTAAACCAGCCTACC | |
| | ACCTGTCTTCCAGCTCCTCCTCTCAGCCTCTGGGCTTCCAGCAGAA | |
| | AGCACACGAGAGCATTCTTGTTGGTTTTCTTATGACTTGAGCCAGC | |
| | GAGACGTACATGCCCAGCACCTGTTACCTGGGCTGGCTCTTGGCTG | |
| | AGAGCATACATGCATTGGGTCAGGTTTCAGATCTGCTGGAGGAACA | |
| | CAGCCAGAATGTCTTGACAGGCAGCCCTGGCAAAGCCCCAGAAAAT | |
| | ATAAGATCTGAGTCTTATGATGGACTCTGTGACCTTGAGCCTCTCA | |
| | CCTCGTGACCTTGGGCATCTCATGTTCTCTCCACAGGTCTCGGTTC | |
| | TGGACTCCTTCATGGGAGCTGTCATGCCCCTGTCACACAGCAGTGT | |
| | TGTGCCCCCGGGGATCAGGGACCAGGATGGTCCTTTCTTGGTGGTG | |
| | AAGGGGGCATTTTGCATATTCCAGAGATTCAAGTTTCCAGACCTAT | |
| | CTAGAAAGAAACATTTGAGTTTACAGGTTGGCGCTTCTCAGCCTCT | |
| | GTCTCTCTTCCTCTCTGTTCATCTCCCTCTGTCCCCTCTATGTATG | |
| | TTTGTGTCTCTTTCTGTCTCCTCTGCC | |
| KCP_8246 | CTCACTGCCTGCAGTTTATTCAGGCATTGGATGAGACAGCTTCTTC | SEQ ID NO. 155 |
| 8 | CTGCTCCATGTGGAGTCAGCTGGGTACTTGAACTGGGACATGGATG | |
| | ATCTACTTTCAAGATGGCTTATTCTCAGGGCTGCCAAATGGATACC | |
| | GGCTATCAGTTGAAAGCTATAAGCAGGGGCACTCTGCATAAGCATG | |
| | GCTCATCTCTACAAAAGCTCCTCCCCAGTCTCCTTGTTTGGGCCTC | |
| | ACAGTGTATGGTAACCTCAGGGCAGTCAGAATGTGACAACTAAAGA | |
| | CTTCAGGAGTAAGTATTCCAGGAAGCAAGATATAAGCTATGTGGCC | |
| | TTCTAAGACCTAGCCTCAGAGGTCACATAGTGTAACCTCTATCACA | |
| | CCCTATTGGTAGATATTGTAACAGAAGCCCACCCAGTTTCACAGAT | |
| | GGGGACATAGACTCCATTTCTTAATAGGTAACTGGCCAGAGTTGTA | |
| | AAAGAGCATGTGGGATGGAAGATATTGTTGCAAGCATCTTTAGCAA | |
| | ATACAACTGGACATACCCAATGCAAGCACAGGATTGATCCTCCACT | |
| | CTGCCCCCATACCCCATGATTTATTAGCCACTCGGACAAGTGACTT | |
| | CAACTCTCCAAGCCTCTGTCTCCTCCACTAAAGTGGGGACAAATGA | |
| | GTATTACAAATGAGACCATTAAATAAGATAATACATTTTAAAAATT | |
| | AACCTGGTACCTGTCACAAAGTACATGCCTAACAAATGTTTGCTTC | |
| | TGTCTCACTTCCTCAATTTCATCTCAGTCAACCTGGACTGACTCAA | |
| | AATGGCATTCTTCTTGGCTGCCCCCTTTGAAGTATTTCTGCTGAGA | |
| | AAATAGTTTCTGTGTATTTGTAAATTTACAGGTTGAACATAGATCA | |
| | TTATTCAAGCATTGCTGGTCGATTCGTCTTTTCAAAGGCGGGAGCT | |
| | GCTGGCTGTGGGAAGGGACCCAGCAGGGGTCTCTTGCAACCCTGCT | |
| | CTATGGGTGGGGGAAATCTGGACCTCCCTCTGGT[A/G]GGGTTGA | |
| | TTGAAGTGAAGGGTCACCATATGTCTTTCCCAAGAGGGTGACTGAC | |
| | TTCCTGCTTTGGTCCCAGTTTCCCTGAGATTTTCCTGAAAGCCCTT | |
| | CCGGCTAGCCCAGTTGGGAGTGTTAGTACATCAGATCCCATGCTTT | |
| | GGTGAAAAATGTAAACACAGACCTGATTTTTCATTTTAAATGAAGC | |
| | CAAGCATATTGCTCCCAGCAGATGCCGAGTGACTCAATCTGTCCTC | |
| | TCGGTTCTGAAGGGAACTGAAGAACAACATGGTAAAATAAAGCAAA | |
| | CAGCACATTTATTGGTTGATAAAATGCTGTTTTAGTCTACCCTGGC | |
| | ATTATATGGTGATTGCTATGTGGCGAACATCTGTTATTAAATCCAG | |
| | ACTTCTGTTGCCTGGATACATTGAGTCAAAAGCTGGAGCGGATGAG | |
| | AAATCCATTTATGCGTCTGTTGCGTGTGAATGTCAGAGCTCATATG | |
| | ATGCCTTTGTCTTCATTCTAACTGAATCTTTTAATATGGACCGTCT | |
| | CACTTGTTAATTCTGACTCAGGGGCAATAATGTTTTCATTTGATTA | |
| | AAAAAGGTTAAAGAAACAAAGAAACAGTGTTTTCTCAGGTGCTCTA | |
| | AGTAATTCTGTTAATGAATTTTCGGAGACAGCGTGTGAATTTGAAA | |
| | AGAGTAGGACTTTTTAAAGAGTTCATACTATGAACCCAATAATTCA | |
| | GATCCTAGGGCCTTATCCTAAGGACATAATAGAAATGAGCACATTT | |
| | ATAAGAACAAAGATGTTCAATGAAGTGTTACTTACAACAGCAAAAA | |
| | AACTTGAAAGTCACCTAAATGTTTGTAAGTCAAGAGCTTCATTGAT | |
| | ATTGACTGCAAAGTCCATGTTATTCCATGTGACGAATTTTTTAATC | |
| | AATCACCTCTTGATGGATTTTAAATTTTTTACAATTTTTTGCTATC | |
| | CTAAAAAAAATGTGTCAATGAACAACTTTGAACTACCCTGACTACC | |
| | ACTTTAGGATAGATTGCTAGACGTGGA | |
| KCP_8579 | ATCACCCCAAATAGTTATGATGAAGGTGATCTATGTACGACACTTA | SEQ ID NO. 156 |
| 3 | GAGAATCAGTGATGGAAAATTCACCAAGAACAGCCACAGGCAGGCC | |
| | AGAAGAATGGCCCTGCCCCTCTACTTTTAGGATTAAGCAGAAGCTG | |
| | GCCCTAGATCTCACCAGTTACCAGTGATCTTGGGCATTTTTAGCAT | |
| | CATGTGCATTGCTTCACTGTGATACCATCTTGCTGGCACAGCCATG | |
| | GAAAGCCATGAGTTAATGCATCTCCCCATGTAACAAACCTCCCCTA | |
| | GGACTCTGGTCCACACCTATCTCTGCTAGATTCTCTGGCATTGCAA | |
| | GAAATTCTTCAGACTGCCCCAAGAGATTCGTTCCAATCTAGGGGCT | |
| | CCTTATCCCCAGCTCAGAGCTGGATTTGGCTCTTGCTTGGAGGCGG | |
| | GAAGCCCTGCTGGGCCAGGGCTTAGAGGGGCTCACAAGAAATCAAA | |
| | GCAAGCATTCTCCGCCTCTCTCCTACAGCCCTGCATGCATCTTCTC | |
| | TGATCCCTTGCCTGAGTGGGGGGTGGCATTCCAAAAGCTCATTACT | |
| | GGCTTACATACTTTGCCTTAAATCAGCTCTTAAATGCCCTGGGATG | |
| | AACAGCCCTAAATAGGAAAGAAAAAAAAAAAACAAGTTTCTTGCAA | |
| | GTTCACAGATATGCTTGGTGCTTTCTGTCAGGCTAGGGTGTAGCCT | |
| | TCTCTGTTCTAAATTTGATTTTCTGAGTCTTTAAGGAAAAATGGCT | |
| | ACTCGTCCCCTGGACGCTGATTGCTTCAGCATCTGAATCTGCTCCA | |
| | TCACTTCTACCTCCACCCACTGGTCCACGTCCAGTGGGTAGAGGTA | |
| | AAGGGGATGGAGATATCATTTATCTTCAAAGGATAAAACTGCTCTG | |
| | AGAGATCTTTGCTTTCTTAGAAACACTGCTGGAAAGTTGTTTCTTT | |
| | AGACTACATTAACAGAAGTACCATCTCTAGGAAGACAAGGTGGTAA | |
| | TAACTAACATCAAATGAGCAGTTCCTATGTACCC[C/T]GTACATG | |
| | TCTTAGCCAACTTCATCCTTGTAACAAACCTGGAAGGCAGGCACTG | |
| | TTATCACTCTTATTCCCAGGTGAACCAGTTGAGGTTCCAAGAAGTC | |
| | TTTTGTGCAAGGTCATGCAGAGTTGAGGCCCCCAAGTCGGTAGACT | |
| | TCAGGAGCCAGACCCTCAACCCCCTCACTGCCTCCCGCCTCATGCT | |
| | GCACTGAGCAGACCATACCCGGATGGTCATGTTCAGGTTGGCTATC | |
| | AATGCAGACCACGCTGGGCATATTCAGGGGACGGATACTCAGAACT | |
| | ATATAACATAAGGAATAGAGGAAGGACTGGAGGATGTATTAACATG | |
| | AAGAAAAGGTAGACTCATGGCAGGAGATGAGCAGGGTAAAGAGGTG | |
| | CAAGACATAAAAAGCCAATTTCATATACATGAAGATTTATCAAGAG | |
| | CCAGAAGGCCCTCTATGGGTCCAAGAGTTACAAGGCCTAATGAGGT | |
| | GAATTAATGCCAGCATATAAGGAAAAGCTTTTGAATACTCAGAAGT | |
| | GTCCAAAAAGGGGTCAGGCTGCCTTGGAAAGTAGTAAGCTCTCCAT | |
| | CAGAGGCTTGGCAACTTCTTATTAGGGATGGTATGAGTATCTCAAG | |
| | TACAGATACAGATGACCCAAATAACCACTGAGGCACTTCTGACCCC | |
| | AAGTATAAGAGATTCTATTGTAACGCACAGGAGTCCATCTCAAGCA | |
| | GCACACTGAGCCATCTCCTTGATALACCTAAAGGTAGGTATTATTC | |
| | CTCCCAGATGCTGTCTTCTTAGCCTGGGATGCAAAAGCCATAGGAT | |
| | CACTTCACGTCCAACCCCCATCAGGTGATCTGTCATGAATCACAAG | |
| | TTATTGGAGCCAGATGGAACTACAGAGCTAAAAGATACATGAAGAC | |
| | ACCGAGGCCTGCAGACAGGGACTAACTTTCCAAGGTCACAGAGCTA | |
| | ACAAGTGTCAGAGTCAGGCTAGACCCAGGACTCACAAGTTGAGCTC | |
| | ACAATTAGTTCCACTTCCTACACCACC | |
| KCP_9354 | CCTGAGCCTCTGCCTCCTTCTGAGAAAGACCCTTGTGATTACATCA | SEQ ID NO. 157 |
| 5 | GGTTCACCTGGATAATTCAGGATAATCTCTTCATCTCAAAATCCTT | |
| | AAGTTGATCACATCTGCAAAATCTCTCTTACCATGTAAGGTAACAT | |
| | ATTCACAGCTTCTGGGGATTAGGACATGCATCCCTAGGGAACCATG | |
| | ATTCAACCTAGCATGGGGGAACCCACTACAGGCAGGTGTTGTCCTT | |
| | GCCATCGCCAGCTCAGTGCTTGGCACAGTAGAGGCCATGGATATTC | |
| | ATTCAGAGAGAGCATGCACTGAGGCAAGCCTGACCTCAAGATCAAG | |
| | ACAGGAAATTGGCTTTCATGGGTTAAGGACCTGTTACTTTGCTCAT | |
| | CAATGTATCCTTAATCATCAGAGGTCAGATCTGCTGGAGAGTGCAA | |
| | TCTTTCAG[G/T]TTCCAAAAGTAAGACTGGATGCCTTAGAACTTA | |
| | AAGTCAGGGAGGTACCCAAGAAAGCAATCATAGACTGAGTCCCCAT | |
| | GCAGTGCACTTTCTCGGATGGACAATTTCTCTGTTCTGACAGTCAC | |
| | TGTTGACTCCATTTCTCAGATGAGGGACCGAGGCACAGAGAGGTGC | |
| | AGTCAGTCACCTGAGGCCACACAGTCAGGAAGTGGAAATCCATGGA | |
| | AACTCATCATCAGCTGCCTCGCATCAGGGCCAGTGCTCTTTATCTC | |
| | CACCCCACACATTATAAAGCCACTCAGCTTTACACTCAAGGGAACT | |
| | TCCTATTTCCCTACTGGATTATATGTATAATTTGTAGTATTGCAAG | |
| | ATTTGAACAGAAGCGAGCAGCAGCTTGTAGTTGTGTGTGTCACTCA | |
| | CTCCTGCCTGTGGGGATGCCACGTGATTGTTTAPAGGGTTGGAATC | |
| | AGGAGAAAGGCAGGCTCAGAGCAGGACCAAGAGAGAGCCCACCCCT | |
| | CGCCTCCC | |
| KCP_9784 | ATTATAAGTATATACCACACTTTGTTTATCCATTCACTTGTCGATG | SEQ ID NO. 158 |
| 4 | GAAATTTGGGTTGCATCCACCTTTTTTTGCTATTGTGCATAATGCT | |
| | GCTATACACATGGCTGTGCAAATATCTAATATTAGTCCCTGCTTTC | |
| | AGTTCTTTTGGATATGTATCCAGAAGCAGAATTCTTGGATCATATG | |
| | GTAATCCTATTTTTAATTCTTTTAGGAACTGCCATATTGTTTTCCA | |
| | CAGCAGCTGCAGCATTTTACATTCCTACCAGCAGTGCACAAGAGTT | |
| | CCAATTTCTCCATATCCTCACCAACACTTGTTATTTTCTGTTGCTG | |
| | CTGTTTGTTTTTTTATTAATAGTCATCCTAATGGGTGTGAAGTTGT | |
| | TTCTCATTGTGGTTTGCTTTGCAGGTTTTGATTTGTAGATTTTCCT | |
| | GATGATTAGTGATGGGTGCATCTTTTCATGTTCTTACTGACCTTTT | |
| | ATATATCTTTCTTGGAGAAATGTCTGTTAACTCTACTCATACTTTT | |
| | GTAAATAGTATTCCCAATCCTTCTAACTCCCCAATGAGGTGGATAT | |
| | TAGTATGTTCGTGTTACAGTAAAGCCAACTAAACCTTAGAAAGACT | |
| | AGGTT[A/T]ATTATCCAAGGTCACACAGCTAGAAAATGACACAGC | |
| | TTGTATTGAAACATCAGTTTTTCTCTTTCCAAACCTAACGCACATT | |
| | TCATGAAACCTACATTATTGCACCATAACATCATGTTGATTTACTT | |
| | ATCTGCTCTCCTGCCTGTCCCATCTACTACATAAATTGAGTGTGGT | |
| | TTGAAATCAGAGACTACTTCTCATCTTTGGCACAGTGGCAGCCATG | |
| | GATCAGAATCTCTTACATGCTGGATAAGTGGATGCAAGCTCAAGGC | |
| | CACACCTAAAGTCCCCAGGTGACTTGATCACTTGAGTTAGCTGCTG | |
| | GAAACCTGGGCTTCCTCTTCTGCAAAATGGGGAGAGAAAATAAATT | |
| | CTCAGTGGATTGTTTAGAAGATTTGAGCAAAGACCTCTGCAAAGTG | |
| | CTAAGCATGTGGCTAGCATGTGGCAGGTGCTGCCTAAATAGTAGAA | |
| | ATTAACACTGCCATGCTTATAAGCTCCGGACAAACACAAGAAGCCC | |
| | GAAACATAATCTGTGCCTTCTGCTTGCATTCCTCCTAGTTGGGGAT | |
| | GTAAAATAGCCCAGCTACAATCAAAGAAGAAAATCAAAGTCAGCAC | |
| | AGACTATGGATATGCTTCTATATGTGTAGATTATTTCCAGACTCAT | |
| | TCGGAAGAATCTGGACATACTGGTTGCCTCAGAGGTCAAGAAAATT | |
| | GGCTCATTTACTTCTGTAACTTAATTTCGACTCTCTATGCTTTTAC | |
| | ATAGTTGGAATTTGCCATGCACATATACTACATTTAAAAGAGCGTG | |
| | TACGCG | |
| KCP_1028 | CACAATTATGCTGTAGGTGAGTTTTACCTTGGGAAACCAAGGCACA | SEQ ID NO. 159 |
| 82 | GAATTTAAGTAACATATTGAAGCTCATGCAGCTGCTAACAGGGAAG | |
| | GCCAGGGTCTGAACCCAGCTGATCCGGCTCCAGCATCCGAGCTCTG | |
| | AACCACTGGTCTATCCTGCCTCTGTTAGGACTTGGTCCAATGTCAT | |
| | CATCCTAGAAGGAACATTTAGGCCCGCACGGTGGGTGGCTGGTTCA | |
| | ATCCAGTTTAAAGGCCAGGAGCAGGACAGTGACTTGCAGCTGCAGC | |
| | AATCCTATGACTCAAACCAAAGCAGCTGTGACAAATAAAGGGACTG | |
| | ACTCTCATTCTCCCGTGCTAGGGAAGGATGAGCTATCAGGCCTTGT | |
| | TGCAGGCTGAGTCAGTCATCCCACAAACCACCTAAGTGAAACCTCT | |
| | TCACTGAGCCTTATTTCCTGAGCGCTCTCCCTTTATCTGTGCTTGC | |
| | AAAGAGG[C/T]GTCTCCCTCCATGCCAGCCAACCCACCCACCCCC | |
| | GCACACACATACCACCTCTGGCTGGAACTGACGACCATGGGTTTTA | |
| | GAAATGAGATAAATCTGGGAGATGAATGTATTCATGAGCCCATAAA | |
| | GGGGTCATGAATCACTGGCCCCAATTACTGCCTTCAATCCTGACAG | |
| | GATGAATTCCCTCAAGCAGATTCTCCTTGTCAGACAACACGGGAGG | |
| | CAGTGTCATGGCTGATCTAGAGCCACAGATAACATCATTATTCCAT | |
| | ACCAGGCTGGTTTCGGTTTCCCAAGCCACCTCCACTTGATTTACAG | |
| | CTCACTTCTGATGCTGGAGACAGAGATAAATATATATATATATATA | |
| | TATATATATATATATATATATATATATATGAAAGAAAGAAAGAAAA | |
| | GAGAGAGAGAGAAAGACACAAAGGGGAAGCTTTCATGCC | |
| KCP_1073 | ATCCCAATAGGACACATGTTGTATTAAAAAGCCATGCGAGACGGAA | SEQ ID NO. 160 |
| 80 | GAAGGAAATTGAATCAAATTTGAGGGCAGGTAGGAGCAGAGACAAT | |
| | AAATAATTCAGCAGTGAAGGAAGCAGAAAAAAGATTGCACTCATTT | |
| | CGCCCTTCAACAATTATACTAAACACCTGCTCTGGGCCACAGAAGG | |
| | GCCAGATCCCATTCCTGTGCTCAGGAAGCCCACAGGCCGGCAGGGA | |
| | GAGGCTGGTTGGAATGTGTGCTTTGCACTGTAACGGAGGCATCGAG | |
| | CATGGTAAGGGACTGGCGGTGGCTGCTGCCTGCGGACGTCGAGCAG | |
| | GGGCCTTTGAAGAGGCAGGACCTGTCTGGAGTCTTACCTGGGCCTT | |
| | GGCCCTGGCAATGGGGAATGGAGCAGGCAGCAGGGGACAGATGCTG | |
| | CCAGA[A/G]ACCGAGATGGTGCCGGAGGACTGGGCTGAGTCTGGG | |
| | TCAAATGACACCGCCCCAGGCTCTCTGCCCTCTGGGGTGAGGCAGG | |
| | AGGCTGCCTCTGTGTGTGATTCAGAGACCCTAGAATCCCAGTGGCC | |
| | ATCACCCCACAGCACATGCCAACCTTTCTGTGATAACTTTCTCTTG | |
| | TGGAACTGTGAAAGTGTAAGACCAGCTCCTGTATAGTGCATGGCCA | |
| | TCCTTTGCTTTGGGGACAGTAAGTCAGTCAACACATACTTATAAAT | |
| | GGGGTCCTGGGCCGTGGCACTGATCTGGTCCTCCCACCTTGCCTCA | |
| | CACTGCCCTTCCCACTCACCACTTCCCTCCTCTGCATCTTAGCCCC | |
| | AAGGGACTTTCAGACCAAGCAGACCTGGAATCAAATCCCACCGCTG | |
| | GGCCTCAATGCCAGTGGAGACAGGAACAGCTGATCCCTGGAGCCCT | |
| | CAGGAGGAAGACGACGGGATGCCTGGC | |
| KCP_1087 | CCCACTCACCACTTCCCTCCTCTGCATCTTAGCCGCAAGGGACTTT | SEQ ID NO. 161 |
| 03 | CAGACCAAGCAGACCTGGAATCAAATCCCACCGCTGGGCCTCAATG | |
| | CCAGTGGAGACAGGAACAGCTGATCCCTGGAGCCCTCAGGAGGAAG | |
| | AGGACGGGATGCCTGGCTTGGCTGCTGGTCTGGGGCAGGTGCCCAG | |
| | TTACAGCAGTTGGAAAAATCCTCAGTGTTGGAAGGAAATTTGGAAG | |
| | TGAGCATCTACCTGCCTGCCGTGCAGTTTGTGACTTTTAAGATGGT | |
| | TGACAGAACATTCCCAAAGGACCACAGCGGTGACCACTGTTCTCGT | |
| | TTCCCTTTGGTGGCTCACTCACTCAGTGCTGGACACAGTGGTCCTG | |
| | ACAAGACAGTGCTGTGGCTTCCATGAACCTAGGACAGGGATAGACT | |
| | CAAGGACTAAGAACAAACCAGGAAGAAGCATCACCACAGGCTCCTT | |
| | GCCAGTCACCTCATCTCACCCTCCTGGCCCTGGCGGATGGGTCTCC | |
| | ATATTTACAGGGGCCAGATGAAAAAACCAGAGGAGCCAGGAAAAGG | |
| | AGCTTCCCCTTCCCAAGGGCGCAAGGTGAGGTGCCAGTCATGAGAT | |
| | GCAAGCCCTGAGCTTTCTGATTCCACTGCATGTGGTCCCAAGGTTC | |
| | GGCGCCGCATCACACAGTTAGTGAGCACACTCTCCTCCCCTGGCCC | |
| | CGAGTGAGCCAGCTGGATGGCAGATCAGAAAGAGAAGTCCCGGGTG | |
| | CCCCCAACATGGCTAGCTCCTTCCAGGACCAGGGGCTAGGCCCCAG | |
| | CTAAGGCTGGTGCACACAGCAGGGCAGGGGGCGAAGGAGTGGGATC | |
| | CCACCCAGGGATCCCACCCACCCCAAACCTGCTTTCGGACATCTTT | |
| | CCAATGCATAATGTGCAGATGAGGCCCTTTGATAAGGACCAAATCC | |
| | CTTTCCGTTGCTTGGCAACCTGGCTCACAAGTCATAGCAGGGAAGT | |
| | AATTTACAGGAATTCAAAGTGTCGCTGGAGGTTC[G/T]GCTGAGC | |
| | TGAATTGCTGCAAAGAGGAACCTCAATGGTCCAAATCACACCTCTG | |
| | GCGGGGAGGAGGGGCTGAAGGAAAAGCTTCCACTTCCGTCACTTGA | |
| | GAGTACAGAGCCCTGAGCTCAGACTCAGCGATCGTTTTCCATTAAC | |
| | GGATTTACTGGTTCCATGTTGAGCTCCTGCTGTGTGGCAGGCCCTG | |
| | TGCTGGGAGCCAGGGACACAGTGACAAACGAGACAGATGCCAACCC | |
| | CGGATGCACAGAGCTCAAAGAGACAGAGGAGTAAACAGGGCTACAC | |
| | ATGTGACAAGATAGGCTGTGCACAGGGGTCTGAGCAGGACCCTTGG | |
| | GGCAGGAGGAGGCAGTGGAGGGATGGGAGGGTAGGGACGCAGTGGT | |
| | GACCAGCTAGCCAGATAGAGAACAGAQGGTGTCCCAGCACAGGGCC | |
| | ACACAAGCAAAGGCAGAGGTGGGGAGAGAAGAGCCTGCCACACTCT | |
| | CAGATCACCATGTGGTTGGGCCAGGGCCCCAGCTGAGGCTGAGGAC | |
| | ACATGGAGCCCAGATCCGGCAGGGCCTTGAATGCCAAGTCAGAAAG | |
| | CATCTGAAATTTAGTCTACAGATGATGTGGGTTATTGACAGCCAGG | |
| | ACAGGGAATGACATTTGTGTTTCAGGAAAACCACTGTCTTCACTGT | |
| | TAGGGGGTAGATTCAGGGAGAAACAGGAGGTGGAGGGGAAGAAACT | |
| | GTGAGTAAAGGAGTCTCTGGGGTACAGGTGAAGTTTCTGTGAAACT | |
| | GGAGAAGAAAACTGTTGAGGCAAGAGTTGACAAAACTTGAAGTAGG | |
| | ATGGAGAGGAAGGGACAAGTTCCCCTGGCATGGTGACGGCCCGGTG | |
| | GTGGGAACCAGGGAAGAGGAGGGGCTTTGCAGGTGTCTGACTTGCC | |
| | CAACAGGTGGCGCCATTTACCAAGATGGGAAGGGCCGGGGAGAAGG | |
| | GAGGGTTCCATTCTAGGGAAATCTCAGGTCCTCGCTATTAGGATTC | |
| | TTTCGGTTGCCAGTGACTGAAACCCAG | |
| KCP_1248 | ACTGTCTAGATCTGGGGACCCTCCCAAGCTCTCAGAGCTTTGGAAG | SEQ ID NO. 162 |
| 77 | GAAGGTCCCTGCAGGGAAACTGTGTGTGTTTCTTCAACAGTGTATC | |
| | CTCAGTGCCTAGCACATGGTAAGTGTTCCATAAACAGCTGTTGAAG | |
| | AGACGGATGGATAACTGAATGAATGGATGCTTCCATGGGCAATGAC | |
| | ACACTAATCTGAAAAGCCCTGTATCAATGAAAGAATCACTTAATAG | |
| | TTTAACTTTTCCCTCATCCTTCAGAACACAGATGGCATGCCATCTT | |
| | CCCTTCAAATCTCTTCCCAGTGCCCCACACAGAAGAGGCACACTTG | |
| | GACACTGGTGTCTGATGGACCCAAGTTCACAGCCTGTCTCTGGTCA | |
| | TCAGGTATCATGACCTTGGGCAAGAAGCTTAACTCTCTGAGCCTCA | |
| | GTTTCCCCTTCTGTCCCCCAGGGAAAATGAGTCCTGCCCCTCCTAA | |
| | GGGAGGTATGAGATGTAAGACCCCGAAGGACACAAAGGTT[C/T]G | |
| | CCAGGAGCCTTCAGGTAGGAGGCAGGTAAGGAGGTCTGCTAGATTG | |
| | GAATGAGTTTCTGGAAGGCCCCAAGGAGCTCAAAATCAGACCTGGG | |
| | GTGAAGGTGTCTTGACCAAAATGAGACCCATCAAAGAAGCCTGGAT | |
| | GAAGGTGCCCACAGCATCCATCAGTGCCAAAAACAGAAACACTTTA | |
| | GCCCAGGATACAAGGAACATTTTAAAGCAACAGAGATAAGAGATAG | |
| | TTAGAACTCAGGCCTCCTGGCTCTTGCTGTTCTTGGCCCATAATTA | |
| | GTTGTTATGGGACCTTAATAAACTTCTTGCCTTCTTGGTACCTTTG | |
| | CCAAACAATCTGATGAGGAGAATATTGAGTCATGGTGCCAGGGAAA | |
| | ATTAGCATATTCTGCAAATTCCTGGCACTGTTAACACTGGATTCTG | |
| | TCCACCTTTAGAAATCCTCAGATCACTATGTCAGCATCCCCCAATC | |
| | ACAGCTCTCCAACTTCAAGGAGGGTTGAGGGGTCTGAAG | |
| KCP_1260 | AAGAATATCAGTTCCACTTCCCTTGTCCCTAGAGAGCCTTGTAGTG | SEQ ID NO. 163 |
| 86 | GATGTTGATGTGTCTTCCAACACATGCACCAACCTTTCCCTGTCCT | |
| | GTAGCAGTTGAGATGGAATCATCCCACTCCCAGCTCCAGGAATAGG | |
| | CTCTGATGGGCTTGAACCCAGCAGCTTAATTCCATTGGTTCTCTAG | |
| | GCCTTCATCATTAGTACAGGAAAGGCACTTGACCTAAATTAGTTCG | |
| | ATAAGATTTAAGCTCAGAAATCTGGTTTGTTGGATGGAGAAAGAGA | |
| | TGCTTTCTTTCTCTCTGGAAGGAGTTTATTGCAAAAGTAAGGGCTG | |
| | GGGCTGCTACAGCCATTGTGCTACCATGAGGGAACTAGCCATGATA | |
| | ACAAAACTTGCCTGGGGAGGGGCTACGCATCACAGAAAATGATGCC | |
| | AAAGTCCTGCTCAAACTGTGCCTGATGCCTGCCTGATCTATGGACT | |
| | TCTTAGTTCCATGTAATGGATTCTCTCTATTTTTAAAGCC[A/G]T | |
| | ATCAGGTTGAATTTTTGGAGAAATAAAACAAAAAGCATCTTGACTA | |
| | ATTTAAAAAATCTTCTTTGGGTATTCAACCCTCCTAAACTCACCCC | |
| | CAAATCCACTGGGAGCATGTCAAGATTTTTGTGAGCCGATTTAGGA | |
| | GATGCAAATTCATTTGCCTTAATTGGATCTCCAGGAAATGACTTCT | |
| | GCCCCCTCTTAAATCATTTAAAGCTCAAAGAGGCATGAGGGCCCTC | |
| | CCCAAGGATGCAGGTATCCTCTTGACTGACAGCCTGTATGCTCTGC | |
| | TTCCAGGATCCTTCCATCTCCTCCCTTTACTGAGGGAGTCTGCTAT | |
| | GTGTTAGAGGTGTCCATCACTGGTCACACTGGGAAGCTGTGGCAGG | |
| | GAAGCTCGAGAAAAAGCAAGATAGGCCCCAGAAAGAACACCAACTC | |
| | CAGACTCAGGGAGACTCAGGCCAGAATCCTAGCTCAACTTCTTCCA | |
| | AGCTCCCAAAGTCACACTCTTTTCTCTGAGCCTCGATTT | |
| KCP_1262 | ATCCCACTCCCAGCTCCAGGAATAGGCTCTGATGGGCTTGAACCCA | SEQ ID NO. 164 |
| 08 | GCAGCTTAATTCCATTGGTTCTCTAGGCCTTCATCATTAGTACAGG | |
| | AAAGGCACTTGACCTAAATTAGTTCGATAAGATTTTAGCTCAGAAA | |
| | TCTGGTTTGTTGGATGGAGAAAGAGATGCTTTCTTTCTCTCTGGAA | |
| | GGAGTTTATTGCAAAAGTAAGGGCTGGGGCTGCTACAGCCATTGTG | |
| | CTACCATGAGGGAACTAGCCATGATAACAAAACTTGCCTGGGGAGG | |
| | GGCTACGCATCACAGAAAATGATGCCAAAGTCCTGCTCAAACTGTG | |
| | CCTGATGCCTGCCTGATCTATGGACTTCTTAGTTCCATGTAATGGA | |
| | TTCTCTCTATTTTTAAAGCCGTATCAGGTTGAATTTTTGGAGAAAT | |
| | AAAACAAAAAGCATCTTGACTAATTTAAAAAATCTTCTTTGGGTAT | |
| | TCAACCCTCCTAAACTCACCCCCAAATCCACTGGGAGCATGTCAAG | |
| | ATTT[T/C]TGTGAGCCGATTTAGGAGATGCAAATTCATTTGCCTT | |
| | AATTGGATCTCCAGGAAATGACTTCTGCCCCCTCTTAAATCATTTA | |
| | AAGCTCAAAGAGGCATGAGGGCCCTCCCCAAGGATGCAGGTATCCT | |
| | CTTGACTGACAGCCTGTATGCTCTGCTTCCAGGATCCTTCCATCTC | |
| | CTCCCTTTACTGAGGGAGTCTGCTATGTGTTAGAGGTGTCCATCAC | |
| | TGGTCACACTGGGAAGCTGTGGCAGGGAAGCTGGAGAAAAAGCAAG | |
| | ATAGGCCCCAGAAAGAACACCAACTCCAGACTCAGGGAGACTCAGG | |
| | CCAGAATCCTAGCTCAACTTCTTCCAAGCTCCCAAAGTCACACTCT | |
| | TTTCTCTGAGCCTCGATTTTCCCATCTGCAAAATGGGGATACTAAG | |
| | GGTCACCTAGCTGGGCTGCCCTGGAGATTCCAAGACATTA | |
| KCP_1290 | GGGTCCTAACAGGCCACAGACCCATCCGTGGCCCAGGGGATTGGCG | SEQ ID NO. 165 |
| 93 | ACCCCTGTCTTTTTTTTTTTCTTTTTTTTGAGATGCAGTTTCGCTC | |
| | TTGTTGCCCAGGCTGGAGTGCAATGGCACGATCTCGACTCTTCAAC | |
| | CTCCGCCTCCTGGGTTCAAGCCATTCTCCTCCCTCAGCCTCCCAAG | |
| | TAGCTGGGATTACAGGCACCCGCCACCATACCTGGCTAATTTTTGT | |
| | ATTTTTACTAGAGATGGGGTTTCTCCATGTTGGTCAGGCTGGTCTT | |
| | GAACTCCCGACCTCAAGTGATCCGCCCACCTCAGCCTCCCAAAGTG | |
| | CTGGGATTACAGGCGTGAGCCACCACGACCTGCCCGGGGACCCCTG | |
| | TCTTAAACCACCCCAGCCTGTGATACTTTGTTATGGTGACCCTAAG | |
| | AGGCAAATACACCCTCCTTTCCCCAACCTCTCCCCTCAGACGAAAC | |
| | CGATGCGAAAAGTGCTTCATGAAGTTTCAGGTAAAGAAGT[C/G]T | |
| | GGGACGAAAAGGGATAGTGAGGATGGCGGGAGGGGCTGAACTCCAA | |
| | ATGGGCTTATCAAGGCTCTGCAAAATGGCGTGACGGCGCTGCCCCC | |
| | TTCTGGTGGCCTGAAGACTAACGCACATGATGTCAAGTGCGGGGCC | |
| | CAAGTACTCAGGAAAAGGTTCTCATTTGGACACTGGGAGGTCTTAC | |
| | ATTGGGGGCCCTGAGCCTCCAGCCCTTCCAAATCTATTCTCAGCAG | |
| | GAGCTCAGCCACACCTGTGTCCCAGAACTGAGGCCAGGCCCAGCCT | |
| | TCACTCCACGCCCAGCCAGCCCCAAGGAACCGACTCCCTGAGGCTC | |
| | TATGCTCCCTGCCTCCAGTGGCCCCGTGTCTGGGAAATAGTGGCCC | |
| | TGGCCTGATGCCCTGACCTGGGCAATCCATCCCCTGGTCCTCTCAG | |
| | CTCCCGGGCCCAGGTTTTCTGGGCTACTTTAACCAGGGCAAACTCA | |
| | TTCCTCGAGTACAAAATAAAAGATTCGAACAGCATAATC | |
| KCP_1291 | GGTTAGTGGGATGCAGCGCGAGGCTAAGGAGTGTCTGGGGCCACCA | SEQ ID NO. 166 |
| 27 | GAAGCCAGGGAAGCCTAGGAAGGGTTTTCCTAGAGCCTTTGGAGGG | |
| | AGCACAGCCCTGCTGACACCCTGACTTCAGACTCCCAGCCTCCAGA | |
| | GCTGGGAAGGGATAAGTAGCTGTTGCTTTAAACCAGTGGTCCCCAA | |
| | CCCTTTTGGCACCAGAAACCGGTTTTGGTTCAGTGGAAGACAATTT | |
| | TTCCACGGACAGGGTGTGTGGGGTGGGAGATGGTTTCAGGATGAAA | |
| | CTGTTCCGCCTCTGATCATCAGGCATTAGCATTAGTTAGATTCTCA | |
| | TAAGGAGTGAGCAACCTAGATCCTTCGCATGCGCAGTTCGCAATAG | |
| | GGTTCATGCTCCTATGAGACCTAATGCGGCTGACTGATCTGACAGG | |
| | AGCGGAGCTCAGGCGGTAATGCTTGCTCGCCAGCTCACCTGCTGTG | |
| | CAGCCGGGGTCCTAACAGGCCACAGACCCATCCGTGGCCCAGGGGA | |
| | TTGGCGACCCCTGTCTTTTTTTTTTTCTTTTTTTTGAGATGGAGTT | |
| | TCGCTCTTGTTGCCCAGGCTGGAGTGCAATGGCACGATCTCGACTC | |
| | TTCAACCTCCGCCTCCTGGGTTCAAGCCATTCTCCTCCCTCAGCCT | |
| | CCCAAGTAGCTGGGATTACAGGCACCCGCCACCATACCTGGCTAAT | |
| | TTTTGTATTTTTAGTAGAGATGGGGTTTCTCCATGTTGGTCAGGCT | |
| | GGTCTTGAACTCCCGACCTCAAGTGATCCGCCCACCTCAGCCTCCC | |
| | AAAGTGCTGGGATTACAGGCGTGAGCCACCACGACCTGCCCGGGGA | |
| | CCCCTGTCTTAAACCACCCCACCCTGTGATACTTTGTTATGGTGAC | |
| | CCTAAGAGGCAAATACACCCTCCTTTCCCCAACCTCTCCCCTCAGA | |
| | CGAAACCGATGCGAAAAGTGCTTCATGAAGTTTCAGGTAAAGAAGT | |
| | CTGGGACGAAAAGGGATAGTGAGGATGGCGGGAG[A/G]GGCTGAA | |
| | CTCCAAATGGGCTTATCAAGGCTCTGCAAAATGGCGTGACGGCGCT | |
| | GCCCCCTTCTGGTGGCCTGAAGACTAACGCACATGATGTCAAGTGC | |
| | GGGGCCCAAGTACTCAGGAAAAGGTTCTCATTTGGACACTGGGAGG | |
| | TCTTACATTGGGGGCCCTGAGCCTCCAGCCCTTCCAAATCTATTCT | |
| | CAGCAGGAGCTCAGCCACACCTGTGTCCCAGAACTGAGGCCAGGCC | |
| | CAGCCTTCACTCCACGCCCAGCCAGCCCCAAGGAACCGACTCCCTG | |
| | AGGCTCTATGCTCCCTGCCTCCAGTGGCCCCGTGTCTGGGAAATAG | |
| | TGGCCCTGGCCTGATGCCCTGACCTGGGCAATCCATCCCCTGGTCC | |
| | TCTCAGCTCCCGGGCCCAGGTTTTCTGGGCTACTTTAACCAGGGCA | |
| | AACTCATTCCTCGAGTACAAAATAAAAGATTCGAACAGCATAATCA | |
| | AATAGGTCATACCCATAAATCAACACATTTGAGCACCTATTTTGTT | |
| | GTTCTTTCACTAATCCAAACCATATTTATTGAGCATCTACTATGTG | |
| | CCATTCTCCAGTAGCCATTCTAGGTGCAGGGGATACAGCAGAGACC | |
| | TTGAAAAAAGGAACAGTCTCTGATCTTGCTGAGCTTAGAGTCAAGT | |
| | GGAGGTGAGGAGGAAGGAAATGAATTAACAACTAAGTGAAGCAGAA | |
| | GGTAACCAATTGATTGACTGACGAAGGGGTACAAACAACAAACACC | |
| | TTCCTTTCTCCAAACTCTATCTTTAACTGTATTCTCTCGTTTTCCT | |
| | TCCTCTCCATTTTACAATCATTTTACAACATCTCTGGCTATTCTCC | |
| | TATATTTCTGATCACTTCGGTTCTCATCACAATAATAATTTCAGTT | |
| | TTCAAGCATTGGAAAGTCCCATCCAATTAAAATGTCAATCTCACAC | |
| | GCAGTTTAAACGTTTCGCCTGCCCGTGAGCTCAGACCTGTCTTGGT | |
| | GCCTCAGTTCTTGTGTGGAGGGGAGGA | |
| KCP_1296 | TGGTGGCCTGAAGACTAACGCACATGATGTCAAGTGCGGGGCCCAA | SEQ ID NO. 167 |
| 90 | GTACTCAGGAAAAGGTTCTCATTTGGACACTGGGAGGTCTTACATT | |
| | GGGGGCCCTGAGCCTCCAGCCCTTCCAAATCTATTCTCAGCAGGAG | |
| | CTCAGCCACACCTGTGTCCCAGAACTGAGGCCAGGCCCAGCCTTCA | |
| | CTCCACGCCCAGCCAGCCCCAAGGAACCGACTCCCTGAGGCTCTAT | |
| | GCTCCCTGCCTCCAGTGGCCCCGTGTCTGGGAAATAGTGGCCCTGG | |
| | CCTGATGCCCTGACCTGGGCAATCCATCCCCTGGTCCTCTCAGCTC | |
| | CCGGGCCCAGGTTTTCTGGGCTACTTTAACCAGGGCAAACTCATTC | |
| | CTCGAGTACAAAATAAAAGATTCGAACAGCATAATCAAATAGGTCA | |
| | TACCCATAAATCAACACATTTGAGCACCTATTTTGTTGTTCTTTCA | |
| | CTAATCCAAACCATATTTATTGAGCATCTACTATGTGCCA[G/T]T | |
| | CTCCAGTAGCCATTCTAGGTGCAGGGGATACAGCAGAGACCTTGAA | |
| | AAAAGGAACAGTCTCTGATCTTGCTGAGCTTAGAGTCAAGTGGAGG | |
| | TGAGGAGGAAGGAAATGAATTAACAACTAAGTGAAGCAGAAGGTAA | |
| | CCAATTGATTGACTGACGAAGGGGTACAAACAACAAACACCTTCCT | |
| | TTCTCCAAACTCTATCTTTAACTGTATTCTCTCGTTTTCCTTCCTC | |
| | TCCATTTTACAATCATTTTACAACATCTCTGGCTATTCTCCTATAT | |
| | TTCTGATCACTTCGGTTCTCATCACAATAATAATTTCAGTTTTCAA | |
| | GCATTGGAAAGTCCCATCCAATTAAAATGTCAATCTCACACGCAGT | |
| | TTAAACGTTTCGCCTGCCCGTGAGCTCAGACCTGTCTTGGTGCCTC | |
| | AGTTCTTGTGTGGAGGGGAGGAGAGGAGAGGGGAGGGGAGGAGAGG | |
| | AAAGGAGACCGGGGAGGTGGGGGGGGAGAGGGGAGGGGA | |
| KCP_1303 | CTATCTTTAACTGTATTCTCTCGTTTTCCTTCCTCTCCATTTTACA | SEQ ID NO. 168 |
| 09 | ATCATTTTACAACATCTCTGGCTATTCTCCTATATTTCTGATCACT | |
| | TCGGTTCTCATCACAATAATAATTTCAGTTTTCAAGCATTGGAAAG | |
| | TCCCATCCAATTAAAATGTCAATCTCACACGCAGTTTAAACGTTTC | |
| | GCCTGCCCGTGAGCTCAGACCTGTCTTGGTGCCTCAGTTCTTGTGT | |
| | GGAGGGGAGGAGAGGAGAGGGGAGGGGAGGAGAGGAAAGGAGACCG | |
| | GGGAGGTGGGGGGGGAGAGGGGAGGGGAGGAGAGGGGAGGGGAGTG | |
| | GGGGAGAAGGGGAGAAAAGCGCAGCTGGCTTCCTCACTCTCCTTTC | |
| | CTTCCTCACCATCCTTACCCTGGCCCAGGGCAGGAGGAGGATTGGC | |
| | AGAGTAGA[A/G]GCAGGGTCTTCTGTCTTAGCTGGGCCTGTTGGT | |
| | GACTTTCTGTTGGCCAACATGGGCTGACTGGAATGTTCTCCAGCAT | |
| | GGCACATGGTCATCCAGATGCAGGCTCTTCCCTGGGGCACTATAGC | |
| | AGAGAGGGCTCTCTTCCAGTCTATTGCAGATGGATGCCCTCGTGAG | |
| | CTGAGTTTTGATGAACATCCCATGTCCCCAGCCACCCCATTCAGAG | |
| | CCTCTTTCTACTCTGGTCCTCTGGTCCCAGCAGCAGCCCTCTGGGT | |
| | ACTGAGGGGAGGGCATCTCACCCAAGCCCCTTAAACCTGCTCACCT | |
| | TCTTCAGAGCCCACGTGGCCGCAGGAAAGTCACAAACCCTTGTGCT | |
| | CCCACAGGGCACACGTGTGCACACGTGTGCAGCTACCTTCTCTCTA | |
| | GTTGGTACCTGAGGCTGCCTCCTGGATTTTCCAGTCTCTGTGTTCC | |
| | CAGACAACCCCAAGCCCCAAGAATACAA | |
| KCP_1305 | AGTTTAAACGTTTCGCCTGCCCGTGAGCTCAGACCTGTCTTGGTGC | SEQ ID NO. 169 |
| 57 | CTCAGTTCTTGTGTGGAGGGGAGGAGAGGAGAGGGGAGGGGAGGAG | |
| | AGGAAAGGAGACCGGGGAGGTGGGGGGGGAGAGGGGAGGGGAGGAG | |
| | AGGGGAGGGGAGTGGGGGAGAAGGGGAGAAAAGCGCAGCTGGCTTC | |
| | CTCACTCTCCTTTCCTTCCTCACCATCCTTACCCTGGCCCAGGGCA | |
| | GGAGGAGGATTGGCAGAGTAGAGGCAGGGTCTTCTGTCTTAGCTGG | |
| | GCCTGTTGGTGACTTTCTGTTGGCCAACATGGGCTGACTGGAATGT | |
| | TCTCCAGCATGGCACATGGTCATCCAGATGCAGGCTCTTCCCTGGG | |
| | GCACTATAGCAGAGAGGGCTCTCTTCCAGTCTATTGCAGATGGATG | |
| | CCCTCGTGAGCTGAGTTTTGATGAACATCCCATGTCCCCAGCCACC | |
| | CCATTCAGAGCCTCTTTCTACTCTGGTCCTCTGGTCCCAG[C/G]A | |
| | GCAGCCCTCTGGGTACTGAGGGGAGGGCATCTCACCCAAGCCCCTT | |
| | AAACCTGCTCACCTTCTTCAGAGCCCACGTGGCCGCAGGAAAGTCA | |
| | CAAACCCTTGTGCTCCCACAGGGCACACGTGTGCACACGTGTGCAG | |
| | CTACCTTCTCTCTAGTTGGTACCTGAGGCTGCCTCCTGGATTTTCC | |
| | AGTCTCTGTGTTCCCAGACAACCCCAAGCCCCAAGAATACAAGAGC | |
| | TCTGTCACCAAGCATCGGGCCTGTGGCTGCACTACACGTCTGCAGC | |
| | TCAGGACCCCTGGCTGCGGCGTAAGCTACCAGCATCCCCTTCTCAT | |
| | GGGCACCCTCATCTCCGGCTCCCCATCGCTGGGCTGTGACCTGCGG | |
| | GGGCGCCCCTCTATGGAAGGGAAGGAGAAAAATTCACAGTGCTATC | |
| | TACTCCTCTGAATGCACTCCCACCAATTTCCTTGGAAATTTCTAGC | |
| | TTTCACTGACATATCTGGGATGGGGCCGTGGTCACAAAA | |
| KCP_1312 | GTCTCTGTGTTCCCAGACAACCCCAAGCCCCAAGAATACAAGAGCT | SEQ ID NO. 170 |
| 44 | CTGTCACCAAGCATCGGGCCTGTGGCTGCACTACACGTCTGCAGCT | |
| | CAGGACCCCTGGCTGCGGCGTAAGCTACCAGCATCCCCTTCTCATG | |
| | GGCACCCTCATCTCCGGCTCCCCATCGCTGGGCTGTGACCTGCGGG | |
| | GGCGCCCCTCTATGGAAGGGAAGGAGAAAAATTCACAGTGCTATCT | |
| | ACTCCTCTGAATGCACTCCCACCAATTTCCTTGGAAATTTCTAGCT | |
| | TTCACTGACATATCTGGGATGGGGCGGTGGTCACAAAATCAATCCC | |
| | ACTTTCCCTCGGCTAGTCTTACAAGCACCCAACAGCTCTATTCAGA | |
| | ATACAGGGCTGCCCAGCTACTTCCCATTCATTATCCCCAGGTTGCA | |
| | AGCTTTAGTCAAAACCCAGAGGCAGCAGGGTGTCTGGTTCCACCTG | |
| | CTGTTAGGATGATTTCAGGAGTGCAAAGTGTTAGAAACGC[A/G]G | |
| | TAAAACATGATGCTTAGAGATTAAGTGGGATGGGGACTGGGCAGAT | |
| | GATGCTGCTTTGGACCCAGCGAGTGAGGTGAGACTGCGACAAGACA | |
| | GAGCCACTGAGCAGTGACCTGGGGGATGGGCATTGCAGGCAAGGCA | |
| | GAACCCCAAGTGGGAACAACCTCACTGGGCTTAGCAAAACTAAAGA | |
| | GGCCCAAAGTATACTGAGCGATGAGGTGAGTGGCGTGGGATAAGGT | |
| | TGGAGAGGAGGCTGGAACCAGACCCTGCAGGGCCTTGCAGGTGATG | |
| | GGAAGGAGTTTGGAAGGTGCTGGAAGGTTTGAAGCAGAGGAGGGAT | |
| | ATGATCATGCCTGTAGCTGCTATGTAGAACAACTGTATGCATGCCA | |
| | GGCCTGTGCCACGCATGCTCTAATCATTACTGGCTTTAACCCTTGC | |
| | ACTAACGTTGTCATGCAGGTAGGAGCATCTGCACCCAGCAAATGGA | |
| | AACTGAAGCTCAGGAATATTCAGTCACTTGTCCAAGGCT | |
| KCP_1318 | ACCTGGGGGATGGGCATTGCAGGCAAGGCAGAACCCCAAGTGGGAA | SEQ ID NO. 171 |
| 54 | CAACCTCACTGGGCTTAGCAAAACTAAAGAGGCCCAAAGTATACTG | |
| | AGCGATGAGGTGAGTGGCGTGGGATAAGGTTGGAGAGGAGGCTGGA | |
| | ACCAGACCCTGCAGGGCCTTGCAGGTGATGGGAAGGAGTTTGGAAG | |
| | GTGCTGGAAGGTTTGAAGCAGAGGAGGGATATGATCATGCCTGTAG | |
| | CTGCTATGTAGAACAACTGTATGCATGCCAGGCCTGTGCCACGCAT | |
| | GCTCTAATCATTACTGGCTTTAACCCTTGCACTAACGTTGTCATGC | |
| | AGGTAGGAGCATCTGCACCCAGCAAATGGAAACTGAAGCTCAGGAA | |
| | TATTCAGTCACTTGTCCAAGGCTCCCCAGCTGTTAGGTGCTAAGGC | |
| | TGGATTCAATCCAGGACTTGCAGACTCCAGTATCTTGGCTTTTCTA | |
| | ACGAGAGTGTGCTAGCTTTCTAATGGGGGTGGGGAAGGCA[G/T]T | |
| | CTGCCCCCCTCCCATGGCACCGTGAGCAGGTGTCACTGCTCCAGCC | |
| | AGTACGCCTGGACACCGACTAGGAAGGAGTATGTGCTACTAGGAGG | |
| | GATGGTCTGGGCTGACTCTTTGAAGTTGACAAGGAGTTGCATAATC | |
| | CCAGCTAATAATTATGCTGGACCAGGGGCAGAGACATTACTCCAAG | |
| | GGTGACCAGGTGTGGAGAAGAGGCTGCTGACTCCGGGGCCCCAGGA | |
| | CCTGGCCCCCAGGTCTCATTGCCCGAGTGCTGCCCCAGAAGGAGTA | |
| | GAAGCTGGAGCTGTCCGGGCCACAGCCGAGGCTGGGTGAATGCTGC | |
| | AGTGAGGCTGCCGCACAAGTTGCGTGTTGTGACATTTGTCTTCTGG | |
| | AGGGGATTGGGATGGGCTACTTCAGCATTTAAAAACCCCTACTAGG | |
| | TCTGAGAAATCCCCTCAGCTTATGAGCCTGGGTGGGCAGCAGGCCT | |
| | TCTCAAGAAGCCCAGAAGGCCAGATGCTCACTTCCCAGG | |
| KCP_1326 | CAGTGAGGCTGCCGCACAAGTTGCGTGTTGTGACATTTGTCTTCTG | SEQ ID NO. 172 |
| 77 | GAGGGGATTGGGATGGGCTACTTCAGCATTTAAAAACCCCTACTAG | |
| | GTCTGAGAAATCCCCTCAGCTTATGAGCCTGGGTGGGCAGCAGGCC | |
| | TTCTCAAGAAGCCCAGAAGGCCAGATGCTCACTTCCCAGGCTCTCT | |
| | TGCGGCTGAGCTGAGAGCAGGCACCTGAGGCCTGGCAAGTGTGACA | |
| | GCTGGTGACACAGACAGACAGGGACAGGGAGATGGGACTGTGCCTG | |
| | CAGCGGTAGCCCTGGCCGGTGTTCAGTGGGGCCAGCATCCGTGTCT | |
| | TTCCTGGGGGCCAGTGGGGGCCGTGGCTCTGACGATGCATCCCTCC | |
| | CCCACGTTTTTTCTCTTCTTGTCTTGGACTTTGCAGGGAGCACTCT | |
| | GCTTTTGGGAACAGGAGCTGGGTCTCTGGCCATTCTCCGCAGCCCC | |
| | TCACCATTCACTCAGTGGCTCTCAAAAAATAGAACCTGGG[A/G]C | |
| | AAAGCTGTTCTTGGCCCCAAACAACATGAGGAAAAATAAATAAATA | |
| | ATGTACCTGGTAACTGAGAGAGTTCCCTCTGCATCTTGGGCTCTTT | |
| | CAATGAGATGTCCTCTGCCTGCAGCAAGCCCCAAGGGCTTCCCTCA | |
| | CCAGGACCAGCACCCTGGTTTGCCTGACCCCACACCTGCCAATGCC | |
| | GGGGCAAGAATGTCCCAGGCTGCCCTGGTTCCCAGAGCTGATGCTT | |
| | CCCACAGTGCCCAGCTGTGCTGGCATGGAGCTAAGGACAGGGCCAG | |
| | TCCCAAGAAAACAACAAGGCTCCAGGGCCACCGGCCACTGCTCAGG | |
| | ACCCTGGCTGACCCCACAGATGCGGAGTGCCTGAGATGGCTCATGG | |
| | GTGACCCCCAGGCATCTGGCAAAGGTCACAATGGCTGTTTGGCTTG | |
| | AAGACAGCCCTTGCAAGATCTGTTTTGAGCCAACCTGTGGCATTTA | |
| | GCCCTCCCTGGGTGACAAATAAAAGGCTGAGGCTTGTA | |
| KCP_1340 | ATTGGAAGATAAGAATGCAGCCAAAGAGGTCTTCAGGGTAGCGTGT | SEQ ID NO. 173 |
| 45 | GGCCTGGGCGCTGAGACTATTGGGCCTAGCAACTTCTCAAGCAGTC | |
| | TATTAACCACAGCCGGTAGCCAGCTTTTCCCCGCCCTTCTCCCAGG | |
| | CACACACAGCCACCTCCATCACCAAAGGTCAGGCGAACCACCTCCC | |
| | ATGGCTACCCCCAGCCTGACTTGCTTTATAGAAATCATGGCATCTC | |
| | ATCCTCACAACAGCCCACACTCACAGTGAATCTTGGCCATTATGAC | |
| | AACTGGGGACACTGAGGCTCGGAGTGGTGGAAATTCTCAGAATCAC | |
| | ATAACAATAAGTGTTAAAGTCAGAATTTCAACTTCATCTCTCTAAC | |
| | TCCAAAGGGCGTGTGTGTGTGTGTGCGTTTCTGGCCATAATCATAT | |
| | TGTGCCCTACAAGCCCCAGTGAGGAATCTGCTAGGAACACTGGTTT | |
| | GGGGAAAAAATGTAATAAAATATGTGATCCAGAAGGCGGC[C/T]T | |
| | TGGTACCTGTCATAAACCCCAGCATGGGGTACTCACTATGCCTGGG | |
| | GTCTGGGCTCTGAAGGCATGATTGAATGATCTCACTGCAGGCCTGG | |
| | TTGTCCTGCGAAGACACCCGTCAATACATGAATATTGACACACAAC | |
| | GCTGCAGTGCACGCGCTTCTGGCAGGGGAGCTGCTGCACTCGAGGG | |
| | CAGCTCAAGGTTAATTTGCAGGGTTCATGTTTGGAGTTTCTGAGCA | |
| | AGTGTTGCAGCTTTGGCCCCCAGCCCCCTGAGGGGAGCTCTGGCCG | |
| | TGCATGAGGGTCAGACAGAAAATCTCCTTTCCTCCATCCAGGCCTG | |
| | CAGTCTGCAGCACTGAGGTCAGCGCTGGCCACAAGCCCACCCTGTG | |
| | CCTCGTCAGCCCCACTGAGCCTCTCCATCTATCATGCCACAGGCTG | |
| | ACCCTGAAATGCAAAATCATTCTGTCCTCCCGCCCTCCACTCCCAC | |
| | CTCGCACATCTATGGATTTGCTGTTCAGAAAACATCTGT | |
| KCP_1355 | AGTTAGATTGAGCTGGGTCCCATCTTGGGCCTTTGCTGGTCCCTCC | SEQ ID NO. 174 |
| 18 | CTAGAAAGTCTGCCCCCTCCCCCTGCAGGGTGGCATCAGCATTCAG | |
| | GCCTGGCCCTGACGCCCTCCTCTCTGGGCCACCTTCACCTCCACAA | |
| | CCCCGGCACCAGCACCCATCCCCACCACATCCCCAGCACGCAGCAT | |
| | CTAGTAAGGGCACCAAATGCATGCCCAGACATATGAGTGAAATGAA | |
| | TTAACCCTGAACCTGAAAAAGGGCAACCACCACACAAGATTCTCTA | |
| | GAAACAATGTGAATTGTGCAGAAGGAAATTAACCCTACTCCATCCA | |
| | GCCCATCCTAAGGCAGGGACTTGGACCTGTTCCTCTTGATGGGGCT | |
| | GGGGCTGAGGCGGGCAAGGCAGGCAAGTGCTGAACAGTTGGCAACA | |
| | TTGCCCATCCCGTCTCCCTGCACCAGGCTGGGCCTGGGGTGAGGGG | |
| | GTGGGGGCCGGGGTAGCTGGGCTCCTCCAGCAAAGAGCAG[G/T]A | |
| | CTGAGTCCCTGGTGACTATTAGGTAAAAGGTCCCTGACAATTTTGA | |
| | GGGGCCAGATGCCAACTCGAGGGATACAGAGAAGATCTAGGCACAG | |
| | TCTTTCCCCACCATGTCAGACAAAAAGGTTAGATACAGGACCTGAT | |
| | ATGTTATAAAACTCAATCAATATTTACTTAGTGAATAAATGGACGG | |
| | ATGGATGGATGGATGCATTAGGCAGCCAAGTGGGCAGCACCGATGA | |
| | CTTAATGTACTGAGTGCTCCGACTCCAGCAACATGCATTCATTGTT | |
| | CCTACTGTGTGCCAGTGAACAAGAGCAATGAACTCAATGACTTCTG | |
| | CCCAGGGTGGGCCAGGGAACCAGGGAAGACTCTCCAAAAAGGCAGC | |
| | ATTTGGGCTGGGACGTACAGATGAGTAGGGGGTCGAGTGTGTCGTT | |
| | ATGTCGCTGGAGCCCAGAGGCGTCCATCAGGACTTGGGGGAGGGCA | |
| | GATGAAAGGGCCTTACTGCCTAACTTGGAGCCACTGTAT | |
| KCP_1360 | CCCATCTTGGGCCTTTGCTGGTCCCTCCCTAGAAAGTCTGCCCCCT | SEQ ID NO. 175 |
| 36 | CCCCCTGCAGGGTGGCATCAGCATTCAGGCCTGGCCCTGACGCCCT | |
| | CCTCTCTGGGCCACCTTCACCTCCACAACCCCCGCACCAGCACCCA | |
| | TCCCCACCACATCCCCAGCACGCAGCATCTAGTAAGGGCACCAAAT | |
| | GCATGCCCAGACATATGAGTGAAATGAATTAACCCTGAACCTGAAA | |
| | AAGGGCAACCACCACACAAGATTCTCTAGAAACAATGTGAATTGTG | |
| | CAGAAGGAAATTAACCCTACTCCATCCAGCCCATCCTAAGGCAGGG | |
| | ACTTGGACCTGTTCCTCTTGATGGGGCTGGGGCTGAGGCGGGCAAG | |
| | GCAGGCAAGTGCTGAACAGTTGGCAACATTGCCCATCCCGTCTCCC | |
| | TGCACCAGGCTGGGCCTGGGGTGAGGGGGTGGGGGCCGGGGTAGCT | |
| | GGGCTCCTCCAGCAAAGAGCAGGACTGAGTCCCTGGTGACTATTAG | |
| | GTAAAAGGTCCCTGACAATTTTGAGGGGCCAGATGCCAACTCGAGG | |
| | GATACAGAGAAGATCTAGGCACAGTCTTTCCCCACCATGTCAGACA | |
| | AAAAGGTTAGATACAGGACCTGATATGTTATAAAACTCAATCAATA | |
| | TTTACTTAGTGAATAAATGGACGGATGGATGGATGGATGCATTAGG | |
| | CAGCCAAGTGGGCAGCACCGATGACTTAATGTACTGAGTGCTCCGA | |
| | CTCCAGCAACATGCATTCATTGTTCCTACTGTGTGCCAGTGAACAA | |
| | GAGCAATGAACTCAATGACTTCTGCCCAGGGTGGGCCAGGGAACCA | |
| | GGGAAGACTCTCCAAAAAGGCAGCATTTGGGCTGGGACGTACAGAT | |
| | GAGTAGGGGGTCGAGTGTGTCGTTATGTCGCTGGAGCCCAGAGGCG | |
| | TCCATCAGGACTTGGGGGAGGGCAGATGAAAGGGCCTTACTGCCTA | |
| | ACTTGGAGCCACTGTATGTTTCAAAACAAAGGAG[A/C]GAGAGGA | |
| | TCCTGGGAAAGAGAAAGGGTACTCTAGGCAGAGGATGTGAATGGGC | |
| | ACAGCACAGGTGAGAACATCAAGACCAGGGGTCAGGGAATCTACTG | |
| | GTAAACAATTGTACCCCAAGGGAGCAATCACAGCCTCTCCATCCAC | |
| | AGGGAAATGCCTGGTGGGGAGGAATGGGAGGAAAGAAACAGATTGC | |
| | ATGACTGTGTCTTGAAGGTCTAATTCCAGAGTACAGCATCACCCCT | |
| | ATCTTCCAGGTCCAGAAACTGAGGCTCAGAGGGAGACTTTCTGATG | |
| | AGTGCAGCGTGCAGATAAGAGCATCTCCAAAGCTACCTCCTTCCCC | |
| | AGTCACACCAGGGCATAAGCAACTGATAACAGCTGTCAGCACGGGA | |
| | CAGTGGAGGGAACACTAGGTTAGGAATAAGGGTACGAGGCTTGAGT | |
| | ACAGATTGTCAATGACTCAGTGTGTGAACTTGGTCAGGTGACTCCA | |
| | ACCAGATGACTTCCTTCTCTGAGCTTCTGTTCCCTCCTCTATGAAT | |
| | GGGGACAATCACTCAGCTTCACAAAACAATGGCTGCGAAATTGCCT | |
| | GGTACAAGAGAGAGAACTTCCAGTGTGTAGGGGCTGTTGTCCTAAC | |
| | TGCCCAGCCCCCTAGATAGGTAGTTATGTCATCTGTGAAATGGGTG | |
| | TTAGAATTCCTACCTCCCAGGACAGCTGTGGGCAGAAAACCAAAGA | |
| | ATGTGTGTGAGAGCCCAAGCACCATGCCTGGCACATAGTAGGTGCT | |
| | CAGGAAAGGCTGAGGGTGCAGCTGCTGTCCACACACATGGTACCAC | |
| | TGCCCCAGGAAGGGGCTTCAGGAACCAAGAGCAATTCTGAGCACTG | |
| | GTGACTGGACTCTGCCATTCTCCATTTCAAACGCTTTTTGAAAGCA | |
| | GCTCCAGACCCAAGCAGGAGAGCAGGAGGCAAAAGAAACGCAGGGG | |
| | CTTTCCCGAATGGAATTTTAGAAACACACAGAATTGTCTCCTGCAC | |
| | AGAAGGGAAGCTGTCTTCCACAGCACA | |
| KCP_1376 | CACTGGAGCTGAGACTCCCAGGTCCCCTAGGGCTTCTCTCCCAGGG | SEQ ID NO. 176 |
| 60 | GCCTCTGGGCTCCCCAAGGCCACGTGCTGCCCCCACTAGAGACCTG | |
| | GGCCAGTCCTGACCAGGGGAAAGAGTAGCGCCGACAACAGCCCCAG | |
| | ATGGTATGTGCACTGGCACATACTGGCAGCTGCCTTCATGACAGCA | |
| | AGCCATAGGTCCAAATCCCGCCCCTTCACAGGGACATTCCCAACTG | |
| | GTCAGGGGTGGACCTCCCCTTCCCGGCTGTCTTTGGTGTCCAGGAC | |
| | GATTTGCCACAGACAGGGGGAGCTAAAGGGGCCCACGCTTGAGGCC | |
| | GCTCAGCTCTGAGTCCTCGCCGGCCACAGAGGACCTTCGTGCCTGT | |
| | CCTCTGTCCTCCTGCCCAGTCCCCAGGCCAGGCTCAGCTGGAGTTG | |
| | GGGAGCAGAAAAACACGCATCTGAATCAAGGCTCTCGGAGCCTTTG | |
| | CTTCTGCCTCCAAGAGGCGAGGGAAAATGAATACCCAGGC[A/G]A | |
| | GCGAGCAAGAGAGACCCTCAGAAAACCCCAGATGCCCCTGGAATCA | |
| | AGCCCTGTCCCACCAACGCCACGTGGATTGACAGGCTATTAGTCTT | |
| | CCTGTAATTAGGATTCTCGCCTCAAATCTTGTATCTTTTTCCCCCA | |
| | GAAGATTCTCCTCCAGCCTTCACCACTGCCCCCTGGCGCTTCCTTG | |
| | CAAGGCTTTTGAAGAATCCTTTGCAGAGAAGCAGCCTCCTTTGGCA | |
| | GGGGCTGCAGAGCACTCTGCCTCCCTAGGCCAGGGCGAACCAACAG | |
| | AGGCGGGAGATGAGGAGGAGCAGCGCGGCTCTGCTGCGTGGCCCTG | |
| | GGCAAGCACCACAACCTCTCTGGGCCGTTTGCACATTCTTACCGCC | |
| | AGGGATGTGGGCGGTAAATGAAAGAGACCAGCACAAACCAGTGTCA | |
| | GCTCCCTTCCTCGATTCCTAAAATGTGATGCCCAAAGATGGGCCAG | |
| | CCTCCTGCTGTGCCTTCTCTGGGGGGACATTTTATAAGT | |
| KCP_1436 | TGGCCGCCTCTTCCAGATAACAACTCTCCTCTCCTTCCCTGCCCTC | SEQ ID NO. 177 |
| 12 | CTGCTCCTCCTGTTCGCGCTACATAACAGACTCTGTGGGGCCTTGG | |
| | TTTATGTATTTCCTTCTCTCCCCTACTGAAATACATGTGAGCGATG | |
| | CTGGGGCAGGCCGACTAGAAGAAGCAGACTATCTGCTTCTTCTCCA | |
| | CCCTTAGAATGGTGCTGGGCCCAGAAGAGGCATGCAGTCGATATTT | |
| | GCTGAATAAATGAATGTCAGATAAAGTGGTGTGGGGACTCCAGGGG | |
| | AAAGATTTGTCATTCTCCACCCTCCCAGTTCAGCTTAAAGCAGAGA | |
| | AGTGAGAGGTGCCCAAAAAGGGGTGTGTCTGGGGGGTGGGGGGTGG | |
| | GGATGTTCCAAGATCTCCAAGGCCTGGATTTTAAGCAAGGTTTGAG | |
| | ATGCCAGCAAGAGGGCCTGGCATTGCCAGATTGATAGTCTGCATTT | |
| | CAGAGAAGGACAACCCCACCTCTGACCTTAGCCC[A/G]AGCCTCA | |
| | ACAGCCTGCTCAAGGAGATCCACCCTTAGTAGGAGGAGGCAGCCAG | |
| | GCCAGGTTCCAGTCCCTGCCACCGCTTGCCAGGTGTGTCTTGGGCA | |
| | GCAGTTGCCTTTGCTCGGTGGTCTTCAGCTTTGCCCCCTGCCAGGC | |
| | ACGTGCTGGCCTCCTGCCTGCATCGTAGCTCATGGAGTCCTCTCAG | |
| | TCACCTCTGTATGCCCTGCAGCATCCCCAGTTCTCAGTGAGAAGAG | |
| | TGTGCTCTGAAAGTTAAGTAACTTACCCAAGGTCACACAAGGTCTG | |
| | AGTCTCAAATGCATACAATTTGACCCCATAGTCTAAGGTCTTGACC | |
| | GCAATGGAATAAGAAATTATTTTACCATTCTGAGTGGCAGTCTCTG | |
| | AAGACTACAGCAATAATTGATGCCTCTCAGGGGGATAGGTGTGTCA | |
| | CTTACAGGTGATAGTGAGGTTGTCCTCAGCCTCCCTGCTCTTCGTT | |
| | AGACCTCCCTCCTCCTCTCTACCCGGGCCAAGCGT | |
| KCP_1449 | GCGGAACACCTCTGCCGCACCTGCAGCAGCCTTGCTCTATTTCTTC | SEQ ID NO. 178 |
| 60 | ACAAGCTTCCCCATGACACTGACCCAAGGCTGTCTGGCCACTACAG | |
| | CTGCTGATGATGATTAGCAATAATAATAATAATAAACGAAATGCCT | |
| | TCTGCTTAGATCATCTTTAATTTCCCCTCCAGAATGACATTCGACT | |
| | CTGCTTAGAGTTACAGGCAGCCCAGCAATTACTGAGCGCAAATACC | |
| | CTGTTCACCCGCCTCACCTCATCCACGCCCCCACAACACCCAGCCC | |
| | TGAGACTGGCTCCACGATCACCTCCACTTTATAAAATAAGATATCA | |
| | AACTCTGAACAGAACGGACGTCTCAAAAAATGGGCATATTACATTT | |
| | AAACCCTCAATCTGTTGGGTATTTGAGTGAAATGGACATACCTCCA | |
| | GGGAGTCGGTGGCGAGGGCCGGCTCTGAGGACTTCCTGGGTTGGGA | |
| | TCCTGGCTCTGCAGGACTGCGTGACCTTGGTGAGTTACTT[C/T]A | |
| | TCCCTCCAAACGCGCTGTTCTCCTTCATAGAATGGAGATGACCACA | |
| | GGGCCAGATTCATAAGGTTGTTCCTTGTAATACAGGTGAATATCCA | |
| | TACCCAGCAACTGCTGGACCACCTGTGGTTTCAAGGATAATTTCCC | |
| | TCCCACGTCCCCGTGGCCCTTGGAACCTTCCTCTCCTCCTGTCTCC | |
| | CCCTGCCCCCATCACTTTGTAATTGAAAAGTCATGATTGCTCTCCC | |
| | AGGTGTAGCACTGCTCACAGGTCAGATTGCCTGCTCTGACGTAGTG | |
| | ACTCAGTTGGATGCGGTTCAGCTGTGTATGATCAACTCCCTCCCCC | |
| | TGACAAAAACATTATTTTGCATCACAGAGAAGTTGATTTCTTTCAC | |
| | ACATAAAAGAAGGCAAAAAGTGGTGCCTAAAGGGCTGGTACAGCAG | |
| | CTTCAAGAAATCAGGAAGAACCTGGGCTCCTTCTGCCTTCTTGTTC | |
| | TGCCAATATCACCCCATGGCTGCCACTTCATGGCCCAAG | |
| KCP_1467 | TTGTGAGTAGGGCACGCAGGGAAGAAACCTGTTCAACCCAGCCCCG | SEQ ID NO. 179 |
| 46 | TGCTAGAAAGACATCAGCAGGGCCTGCAAAAGCCCTGATTAAATCT | |
| | CACAAGTTTGCACCTGGAGCCGCCATCTTGAATTGCAGGTGAATAT | |
| | CAGCCTTTGGTTTGGGCTGTGTGCCCCAGATGATGGTGGTCCCAAA | |
| | TTACATAGGCCAATATCCAGAGCTGGGTTAAAATGAAGCATTTCGA | |
| | GGAAAAAAATGCAATGAAATTTGTTTAACCGGTACTTCAGGCTTTT | |
| | GAGCACAGAACAGCGTCCATCCCTCCAAACACACACTGAGGATATA | |
| | CACTTAGCCAGGAGGGAACATAAGGAGGGGTGGACAAGCCATGTTT | |
| | ACTAAAATCTCTCAGTGTGTGCCAGGCATGTTCATGTATATTCAGG | |
| | AAGAAGTGTCAGTATTTAAGATCCTCGGCCCTTGCCCGAGTCCCCA | |
| | ACACGCCTTCTTGTCTGGAGAACTGTAAATCTTGGAAACATCTTGC | |
| | AAGGGGGGACACCTCACAGAAGGCAGGCTTGGCATGGGATAAACAG | |
| | AATCGACTCCTCTGCTTCCTTCTGATGCACAGTGAATGGGCAGGTG | |
| | GAAGCATCGTTGCTTAAAGAGGAACCAAAACTCCACCCCAGAGCTG | |
| | CTAATTCCTTTTGGCTTGCAGTTATGCAGAGGGCTAAAAAATCCAA | |
| | CGAATCACAAATCCCCTGGTTGCTAAGTAGAAAGAATATGTTTTGG | |
| | CTGCTGCTGTTCCCTTCCCCAAGGAAAAGATTCAAGCAGAGGCGGT | |
| | CCCCACCTCTCAACACAGAAAGCAACATCTCTGATTGCCTCTAGAC | |
| | ACACCTTCATGCTCGTGGCACTTTGGGACCCTCTGCCCGCTGGCTT | |
| | ATGGGCATGGCTTCCCCATCACTCTGGGTCCTTGGGAAGAGCCTCT | |
| | TTCCCAGACCCCACCTCTGTGCCTCATCACATTTCTCCCAGGCTAT | |
| | TGACTTGTTCAAGGTTAAGGTATGAAGAGAGTCA[C/T]GCAGCAG | |
| | CCCTACCTGGCTCTGCTCTGCTGGGGGAAGCCTTTTCAGAGCCTGC | |
| | CTCTTCCTCAGCATGAGGGGCTGCTCGGGCCCAGTCCCAGAGGCCA | |
| | TGCTGGTCCCAGGGGAAGGTGGCCGTCATCCCCATCTGTGTTTTCT | |
| | CTTGCAGGTAAGTCATGCTCCAGCAGTCGGGAGGGTTGTGTGATGA | |
| | CACACTTGGCAGTTTGGGAGCAAAAGCCGCCACAGTAAGACACAAT | |
| | TGATTCATTGCCTCTCAACCCTCTGCTGGGGTGGACTTTCATGCGT | |
| | GGACTTCTGTCCCCAAAGAGGCTTCTCTGGGTCTGGAAAGGGCCCT | |
| | AGCCTTGGTTGGGGGAGGCAAAGGGGTGGCGGCTTCCAGGTACCAT | |
| | CTGGCCAGGAACCGGCTCCATTGTCTGTGCATGTAGCTTGCACTGG | |
| | GCTGCCTGCTCCAAGGGAGGCATCTCCCCACGATCTACGACATTGG | |
| | CTTCAAAGAGCTGCTCCTGGCAGCTTCGAATGGCTGAGACCTACTG | |
| | GCATGGGATGGAGGAGTGCAGGGAGCTTCCCGGGACCTCGCTAGTC | |
| | CTGCCTGGATGCTCAGAAGGCCCTCGTCCTCGGTGGCATGCAGCCT | |
| | CGGCCATTTCCAAACTCACGGCATCTCACCCAGCCATGTCACCCAC | |
| | CCCCGGCTCTGTCGCCCTTCCCATCACCTTTCTCCCACCCATCACC | |
| | TCACATCAAGGTTTCAGCCAGCGGGAACCAGGTTTAGACTCCAATT | |
| | ACCTGTGCGTGTGGGAGGTTGGATTGTGACATCTTTGGAGGGCCGG | |
| | GCTTCTGAAGCGACATTTGATTTCTGGTACTGAAATGTCAAAGGGT | |
| | CCTGAGGCACCCGCTAGGGCAGCACGCGGAGCATCCACCTGCGTGC | |
| | GCATCCTGGGCTCTCTCTGGGCCACTTGGTGCTGGGGACATGCCGG | |
| | GAGCTGGTGGTCAGCCCTCCTCCTGCCTCCTCAGTGCTGCATCTTC | |
| | ACCTTCTGCAGCTGCCTACCAGAAGCA | |
| KCP_1492 | ACACCTTGACTTTAGCCCAGTGCAACTGACTCCACATTTCTGGCTC | SEQ ID NO. 180 |
| 16 | CAGAACTGTAAGAGAATACATTTGTGTTTTGTTAAGCTAGCAAATT | |
| | TGCAGTAATTTATGACAGCGCTATGAGAAACCAAAACACCAGGATT | |
| | ATGCCCCAAGGATCCTGATGCCCTCCCTCCTCTCTGCTCTGCAGTG | |
| | TGCTGGAGCTCACAGGGCTCTGCTGCTGGGAGTTAGTATCTAGTCC | |
| | AACACTTTACCCACTCACCCCCCAAGCTAAGGGACTCCTGAAATCA | |
| | GGGACCAGATGCATAATAGGTGCCCAGGAAGTGAGACTCGCCTTCC | |
| | CCAGATTAAGAATAAAGAAGACAAACTATCCACGGCTGCTGTGAGC | |
| | CTCTCATCAGACCTCAGCTTCTAGGGCAGGGTCCCTGCCTGTCTCC | |
| | AGTATGTGGCCTCTGTGTCTTCTTCGCCCTCCATCCCCACAGTGGG | |
| | ACGAGAAGTCATCAGGAAGGCAGGGGATCTGCAGGCAGCC[A/G]T | |
| | CAGGGCTCTAATTGCAGCTGGCTGGGGGACCATGGGTCAGGGCTGC | |
| | CACCCCCTGGCTCTGTGCCTTCACCTGTGTAACGAATGGGGCACTC | |
| | ACAGCCCCTCTCAAGTGGTCCTGGGGATGAAGTGAGAAGGTGACAT | |
| | ATACAAGTGAGTTATACACGTTCCTGTTCTGTCACTCACCAGTGCT | |
| | CACTGGGTGGGTCACTGAACTCCCCTCAGCGTTTCCTTCTCCATCT | |
| | GTAAACCACCAGTGCAAACCTTTCCCAGATAGTGCTGACCCGAAGC | |
| | AGGAACCAGTGCCCCTCTGCCCTCAGTAAGTCTGCCAGCAGAGGAA | |
| | GCCCATAGAGGGTCTTGGGAAATGAAGCCAACAGAGTCAAGAGGGT | |
| | CAGATGATGAGGGACTTCAAGTGCCACCTTCATCCCATTCTTTCTG | |
| | CAAATATTCACCACACACCTACGTGACCTCAGGCTCTGTGTCAGGT | |
| | CCTGGGGATGTAATGGTGTCCATGAAGAAACAAGGTCCC | |
| KCP_1495 | TCCCCAGATTAAGAATAAAGAAGACAAACTATCCACGGCTGCTGTG | SEQ ID NO. 181 |
| 35 | AGCCTCTCATCAGACCTCAGCTTCTAGGGCAGGCTCCCTGCCTGTC | |
| | TCCAGTATGTGGCCTCTGTGTCTTCTTCGCCCTCCATCCCCACAGT | |
| | GGGACGAGAAGTCATCAGGAAGGCAGGGGATCTGCAGGCAGCCATC | |
| | AGGGCTCTAATTGCAGCTGGCTGGGGGACCATGGGTCAGGGCTGCC | |
| | ACCCCCTGGCTCTGTGCCTTCACCTGTGTAACGAATGGGGCACTCA | |
| | CAGCCCCTCTCAAGTGGTCCTGGGGATGAAGTGAGAAGGTGACATA | |
| | TACAAGTGAGTTATACACGTTCCTGTTCTGTCACTCACCAGTGCTC | |
| | ACTGGGTGGGTCACTGAACTCCCCTCAGCGTTTCCTTCTCCATCTG | |
| | TAAACCACCAGTGCAAACCTTTCCCAGATAGTGCTGACCCGAAGCA | |
| | GGAACCAGTGCCCCTCTGCCCTCAGTAAGTCTGcCAGCAG[A/G]G | |
| | GAAGCCCATAGAGGGTCTTGGGAAATGAAGCCAACAGAGTCAAGAG | |
| | GGTCAGATGATGAGGGACTTCAAGTGCCACCTTCATCCCATTCTTT | |
| | CTGCAAATATTCACCACACACCTACGTGACCTCAGGCTCTGTGTCA | |
| | GGTCCTGGGGATGTAATGGTGTCCATGAAGAAACAAGGTCCCTGCC | |
| | CTCATAGAGTGGCCTGACATATGCCCGAGGCAGTCAGCAGCCGAGT | |
| | GCGGGAGACTCTTGAGCAGAGATTGAGTGTGTTGATATCTGTAGGC | |
| | ATCAGCCTGGCTTTGCTGAGTGAGCTATATCAGAGTGGAGGAGGCC | |
| | AGAGGCAAAGTCCAGACTCCACTGGATCCTGGATTGAGGGGAGAAG | |
| | GGGCTGGGCGGAGGAGCAGCCTGAGCACCTGCATCTCACTCCAACT | |
| | GGGTGCTGATTTGTCCCCATGGCCCCAGCACCCAGGCAGGTCACCA | |
| | AGTAAGCTCAAGACAAAAATGATGAGTGACTCAACAGTG | |
| KCP_1567 | ATAAATTGGATTTCATCAAAAATTTAAACTTCTGCTCCAAAAGACA | SEQ ID NO. 182 |
| 32 | CTCTTAACAAAGGGAAAAAGCAAGCCACAATATGAGAGGAAATATT | |
| | TGCAAAGCATCTGATAAAACATGTGGATCTAAAATATGCAAGGAGA | |
| | ATAACAACTCTATTTTCCACTAAGGAATGAATGACTGTACAAGGAC | |
| | CACATTCTAATTAGGAGCTTCTGAACCCAAAGGAATTTCAGATAAG | |
| | GGGAAATTTAGGCCCAAAGCCAGGAGAAGGGGTGAGTAGGGCTTGA | |
| | TCTCTGCCTCTGAAGGGCAGAGGGCGTGGACTATTCTTGGCTCTTA | |
| | GGGGACAGCTAGAGAAATGTGGGTCTCATGGCGACAACTCTGGACT | |
| | CCATTGGAAGAACCTTCTAACAGTCAGGGCTCCCAGAGATAAACTA | |
| | GACAAGTCACCAAGAGAGGCAGTGGGTACCCCTCACAGGAGGGGTG | |
| | CAAATCAAAGCCAAGGCTTGGAGTGGACCATATTAAATCC[A/T]T | |
| | TTCTTATCCTGTGATTCTTAGAGTCCTATCTGTATCAGGGGAAGGC | |
| | AGGTGGGTTCTAGAACTTTCTAAATGTGTCCCTGTGGGTTTTTCCT | |
| | TCTCCAGCTACACACAAACTTGGGCCTAATAAGAAGTCTATGGCAT | |
| | TAACCCAGCAGGAATGCTTAATGCTTATATCTGACCTCAAACCAAG | |
| | ACTGTCTCCACAGTGAACAACCCCGTCCTGTCCCCTGGCCGTCTCC | |
| | TTAGCAAATGCCATCAGTCAATGGTGCAGCCATCTTGGAGCCCTTG | |
| | CCATCTATAATCTTCTACCGCCACCCCCCCAGCTGATTGTTTTCTT | |
| | TGTATGTCTCCTTCCTGGACATTACTTATTCTTTACTTTTAAATAT | |
| | TTGCTTCCGTAAAAAAACAAATGAATGCCTCGGACAGATTTATAAA | |
| | GAACATTCCTGGAGAGGCGGGTGGATTAATTATTCAGCATCCTCTC | |
| | CCTTTGTAACTATTTATTGTCTCATATGCATTTATATGG | |
| KCP_1586 | TTGCCCAAGTGATGTTCCATGTCAGGCTCTAGGGTCCCTGCAGGGA | SEQ ID NO. 183 |
| 17 | CAGAGAGGGACTAACATTTACTTACATGCCTATAGTATGTCAGGCA | |
| | TATACTTGTGCCTTTATATATATCAGCTCTGTTTTTGTCATTAAAA | |
| | CATCCCTGTAGAAAGATAGGCACTGCTGTCCCATTTTACAGATGGG | |
| | GAAACCCAAGCTCTGAGTGGTTCAGCAAACCCTGGGTGCATACCCC | |
| | CACCTTGCCCCTGCAAAACCAACAAAAAAACGAAGGCCCTGCCTTC | |
| | CTGGAGCTGACATTTAGGTTGATTCTGAAAGTCAGTAGGCCCAGAT | |
| | TTTCACTCTTCATTTTTCTTGTTTGGAATGAGAGAGCACACAGCTG | |
| | GGTCGGGGGAAGGAGCGAGGGTCTAGGCCTGCATCCACTCACCCCA | |
| | AAGGAAAGGAGTAGGGGACCAGTCTGCTGGACATGCAGACAGCGAT | |
| | TGGAGAAAAGTCAGCCCAGCTATGAACCCCATTCCTTTCAGTA[C/ | |
| | T]GAGCCAAGAGGGATGGCATCTGTCAGAGTTGCTGGATTTGGGAT | |
| | TTTGCATCTTGCCAAGTGTCCATGAGGAATTGGGGAAACTCTCCCC | |
| | CTGGCTGGACTGAGGCTTCAGCAAGCATTGTTGCTGCCCAGTGGTG | |
| | ATCAGCTCAGTGTCCTTGGAAAAGAGCAGAAAGTGGTATCACGAAC | |
| | ATATCTTCTCCTTTGCTTCCTTCTCCTCACTCTTCATCATCATCAT | |
| | CATCATCATCATCAAATATGGATCTGTGAGGCTACCTCTGGGGTTG | |
| | AAACTTGGTTTTGGGCAAAATTTGTGATGTTCTCTCTGCCCAATCC | |
| | AGCCTCAGGCTACAAATGAATGTAAAAATCTCTAATTTAGTGCCAA | |
| | GTAACAGAAAACAGCTCTACTTATCTTAAGCCAAAAAGAGGGACTT | |
| | CTCAGAGGCATACTAATGGAGGATGGCAAGAGGGCCTCACGTGGAA | |
| KCP_1601 | GCTCTTCTGCTGTGGAGGATCCATGCCATTGACCTAGGCACCCGTT | SEQ ID NO. 184 |
| 45 | TTCCACATATTGAGCATTGCTGAGCACCTATTCTGTGCCAGGCACT | |
| | GTGCTTCAGGGCCATGGGGGATGCTCCAAGCGGTAAAATGCAACCA | |
| | AAGCCCCGAAGGAGCTCACATTCTAGTCATGTCCAAAGAGAGGTAA | |
| | TAAATCCATAAATTGTATGTACTATTCTAGTCACAATAAAATTGTG | |
| | TCGTACTGTAATGCTGGGTATCCATTTTAAAACGGGGGGCATCGGC | |
| | TGAATCTGGGTCATTACAGTAGGAAATGCATATATATAATCATTTA | |
| | CTCATGAATATTAATGTATTTAATGAGGGTAAAAGATATTACTTAA | |
| | AGCAAAGTATTCGTTCCAGCTACTGTTGGATTTGTTCATTACTGTT | |
| | TCCCATGCAGATATTACCTGTGATTTACCTGCATATCAAGCATCTG | |
| | GAAGTAGCTCAAATCCACCTGTGGGTAAATTAGGTTAGCC[A/G]T | |
| | TTGTTGGCAAAAATTACAGTGTTAACTAATTTCCAGGGTATGCTTG | |
| | CAGTCAGTAGTTTCATACTTAGGTACATGACTTGCATTCACATCAT | |
| | CTGGTTAATGGTGTGAACAGAGATTTTCTTTATGGTTTTTGGAATA | |
| | CAGTAAGATAATGTTAAGCTAACGTAAGTCTGTTAACAGTACCTGG | |
| | TTCTGAACTGTATTTATAAGGTGTATCATAAAACCATTACTTTGGA | |
| | GTTTGCCAATCTTAAATTCAGAACAATTCAAAAATGAGCCAGAATC | |
| | TAGTTTGCATCATTACCACTTATAAAAATAAGGATCTGTAAGTTGG | |
| | CTGGATAAAATATATTACAAAATAATGACTTAAGTGGCTCTGGAGC | |
| | CAGCACAAAAGATAAAAATTGGGTATACTCAAAATTACCTTCAAAA | |
| | TATCTTAAGTCATTCTTAAAATACATGTAAATATGCCAACTCAAAA | |
| | TACATCCAACAAAACTAATATTTTTCCCAATTTGTTGGA | |
| KCP_1648 | TCGACGTTTCCAAAGTCATGGGGCCTATGGTTTGTGAGCTTATTTA | SEQ ID NO. 185 |
| 97 | GGTTGTCCCCGGGCCCAGCATCAAAAGCATTGAGACACGTACTGAG | |
| | GGACTCTTTTCCTAGCCTCTCAGTCCTGACTGCTCAAGGACCAAGT | |
| | GGTACTTCTTGCCTGCGTTCCTTTAATGCTTGCCTAATATGAGCTA | |
| | GTCTTCTCTGATCACTTTTTTTTTTAATCCAAAGTAGGTGGGCATT | |
| | GTCCCAAGAGCCTTTGGAAAGCAGCTGCCTCTCACTAGGACTTCAC | |
| | AGCATCATTTTGCTTTGCTCTCTTTGTGGTTAAAATTACCTTCCAT | |
| | TCGTGGTGGGTGTATGTCAGGATCCCCACAAGAAACAGAGGGACAC | |
| | CCAAATTAGGGACATACTTCAGAGGGACTAATGACAAAGGCATGGG | |
| | TGGGAGTAGAGGGGAATACAAGGGAGACTTCAAGAATCTTGGCCTT | |
| | TATTATAAATGCAATGTATGTCCACTATGGAAAATTTGGG[A/G]A | |
| | AAAAAGCAAACTAGAAAGAAGAAAAACCACATTGCCTGAATTCCTA | |
| | CTGCATGGAGAGAAGCATCATAAACACCTTTTGGAGGAGTCTCTTC | |
| | TTCCTTTCTCCCTTTCTCCTTCTTTGTATAGAGAGGTCTTTCCTGA | |
| | GGACTTCCCAGAATCTTGCAGATCCAAAATCTTAAGAATTTGCAGA | |
| | GGCAGTGAGGAGTTAACATGCACAGCTCAGGGAATATTCTGCTTTT | |
| | TATCTGGAACCAGGCTCGGAACAAGACTCCTTGCTTTTCTGTCCTG | |
| | TGTTTTCATCTTCTCTCAGAACCCTAACTTTGAGATAAGATCTTTG | |
| | ACTATTATTAGGCGGGTGCAAAAGTAATTGTAGTTTTTGGCATTAT | |
| | TTTTAATAGAACTGCTTCTGTGTCCTCAGATCTCCATCGTTCATCT | |
| | CCTGATAAGTCCCTGAAAATTTCCTGGCCCCTTGGAGCTCCTTCCA | |
| | GGAGTAGAATGATCACAAGAGCTGCCATGTATTGCTTAT | |
| KCP_1692 | TTGCTTATTCCAACTTGGACTTGCCGGAGTCCCATAGACAGAGGCT | SEQ ID NO. 186 |
| 34 | ACTCTCCCACCGTGCTGAAGCTGGTGCATGCCATGTTTCAGTAAGA | |
| | GAAAGGAGGGTGCCTGGGCTTCGTCTCCACCCAGGTGCCTCTCCCC | |
| | CAGCAGCTGCACCAGGCCAGCTGAGGGGGATTTTAGCCCGAATCCA | |
| | GGGTTTCTCCTACAGAAGACAAGGAGTTTGGGCACTGCCAGAATTA | |
| | GAAGAACAGAAAGAAAATGTTCTGGATTTCTCATCAAATGCCCCTA | |
| | GCCTGAGAAATATAACTAAATTCACCCTTAGGTCATCTTACAATCT | |
| | GTCCTGCCCCAGTGTTCCCCACTCAGGGAACTGCTCCACCCACATC | |
| | CTGGTCCCCAAACCAGAGGCCTGGGAGTCACCCTTGACATTTCCTC | |
| | CCCTACACCCCTAATCAATCAAATCCTGTTTATCCTGCCCTCTGAG | |
| | AGTCTGCACCGAAATCTCTCTCCTCTCCTTCCCACCTACC[A/G]T | |
| | GGCCCAGCAGCTTTACCATCATGTCTCACGGATCTCTGCACCGCTC | |
| | CCAACTGGCCTGTGCGTTCACTCCTGCCCCCTCCTCCAGCCCTGTG | |
| | TACACTCCCTTCCACCATCCTTTCTATACTCTCCTCAATCCTATCT | |
| | GCACCCTCCTTCAACCCTGTCTGTACTCTCCTCCAATCCTGTCCAC | |
| | ACACTCCAAACAAAGTCATATTTCCAAGACAAATTTGACCATGCCA | |
| | CTTTCTCCCACAGCTCTCCACCACCTCCAGGATCCCATCCTCAGTG | |
| | TTAGCCAGACACTCCCAAGGCCTTGTGATCTGCCCTGCCTATGTCT | |
| | CCAGCCTCATCCTGCAACTCCCCCTACACTCTGTGTTCTGGCCATC | |
| | AAACCAATGGGCTCCTCTTCCTGCACCCCCATCCACTCTTGCACAT | |
| | CCTGCACTCTATGTCTGAACAGCTCGGTTTCTCTTCTTTTCTTCTG | |
| | CCACATGTCTGCTCTACCTGCAGGTCATCTTAGATGTCA | |
| KCP_1738 | AAAAGGGAATTTATTGGCTCATGTAACTGAACTTCAACATTTTACA | SEQ ID NO. 187 |
| 48 | GAATCTCATTGGCTCCAATGGGCTCATACGTCCATCCCCAAACCAA | |
| | TCACAGTGACTGAGGGATTATCCAAGGATCACACTGGCCACTTTCA | |
| | CAGGTTTTATCCCTAAAGGAAATCACAGGTAATAGATGTGGGGCTG | |
| | CAGAAATGCAACATGCACTTTTCCTTGAAACTGCATCCCTTTTCCC | |
| | TGAAGATGAAGCTTGAAAGAACTCTAAGAGGTTAAGCATGGAGCTG | |
| | ATGGGCAAGCCACAGGCAGAAAGAGTAGCTGTGCAGCCAGGCTCCT | |
| | GGCCAGGGAGGGCAGATAAGGAGGGGAGGCAAAGTTTGGTAAACAG | |
| | GAAGCTAATCTATGGGCAAGAATCATTTTCTTCAGCATCCTGACCT | |
| | CTCCTAAAATGTTCTCCACTGGTCCCTGCTAGGACAAAGGAATTAC | |
| | CACCAGACTAGAGTCAGGAGTCCTGGGCTGGTTCTGCTGT[A/G]T | |
| | GACACAGGACAGGTGGCTTGCCTGGTCTGGGCCACAGCCTCCTCCC | |
| | CTGTTGATGAGCATGTTGGTTGTTCCAGCACCATGTCAGCCCTAGA | |
| | AATCTCTGAATTCTTGACCAGATCAGTAATTGCTCTCTTGCGTTTA | |
| | CTTTTCCTTCAAATAAAGAGATTGGCATACAGGGGAGGAGCCCAGT | |
| | ACAGACGGCATGCTTGGCTCAGGTTCCAGAACCCAGAAACCAGACA | |
| | AGAGTTGGGAAACCATGATGGTGGAGGAGGGTGTGCCACTCCTTAC | |
| | TAGTGCCTAATCTCTTCGAGACACTAATGTTTCAGTATTATCCACA | |
| | GATTCTGATGCCAGGCAGCCCAGATGACTGGGGTCAGTTATTAGCA | |
| | TGCTTCCTGGAGGTGGTTCCCAGGTGCAGGCTACCTGCAGTCTGGC | |
| | TGGATGGGCCCTGCACCACACTTGCTTCTGGGAAGCTGGTTTTGGG | |
| | GTTGCCACAATCTCTGAAAGAATCACTAGGCCACCCTCT | |
| KCP_1739 | TTCACAGGTTTTATCCCTAAAGGAAATCACAGGTAATAGATGTGGG | SEQ ID NO. 188 |
| 82 | GCTGCAGAAATGCAACATGCACTTTTCCTTGAAACTGCATCCCTTT | |
| | TCCCTGAAGATGAAGCTTGAAAGAACTCTAAGAGGTTAAGCATGGA | |
| | GCTGATGGGCAAGCCACAGGCAGAAAGAGTAGCTGTGCAGCCAGGC | |
| | TCCTGGCCAGGGAGGGCAGATAAGGAGGGGAGGCAAAGTTTGGTAA | |
| | ACAGGAAGCTAATCTATGGGCAAGAATCATTTTCTTCAGCATCCTG | |
| | ACCTCTCCTAAAATGTTCTCCACTGGTCCCTGCTAGGACAAAGGAA | |
| | TTACCACCAGACTAGAGTCAGGAGTCCTGGGCTGGTTCTGCTGTAT | |
| | GACACAGGACAGGTGGCTTGCCTGGTCTGGGCCACAGCCTCCTCCC | |
| | CTGTTGATGAGCATGTTGGTTGTTCCAGCACCATGTCAGCCCTAGA | |
| | AATCTCTGAATTCTTGACCAGATCAGTAATTGCTCTCTTG[A/C]G | |
| | TTTACTTTTCCTTCAAATAAAGAGATTGGCATACAGGGGAGGAGCC | |
| | CAGTACAGACGGCATGCTTGGCTCAGGTTCCAGAACCCAGAAACCA | |
| | GACAAGAGTTGCGAAACCATGATGGTGGAGGAGGGTGTGCCACTCC | |
| | TTACTAGTGCCTAATCTCTTCGAGACACTAATGTTTCAGTATTATC | |
| | CACAGATTCTGATGCCAGGCAGCCCAGATGACTGGGGTCAGTTATT | |
| | AGCATGCTTCCTGGAGGTGGTTCCCAGGTGCAGGCTACCTGCAGTC | |
| | TGGCTGGATGGGCCCTGCACCACACTTGCTTCTGGGAAGCTGGTTT | |
| | TGGGGTTGCCACAATCTCTGAAAGAATCACTAGGCCACCCTCTGAG | |
| | TGGGTCCTTCTGTAGGAATTATGGATAAAATTGTTCCACTAGTCTT | |
| | ACCTTCTTGGGGAACCCTTCCTGGATTCCCAGGCTGGGCTGGGTGT | |
| | CCCTGCAGCCTAGCCCCACAGCCCTCCTGCTTCTCTTTC | |
| KCP_1742 | TGACCTCTCCTAAAATGTTCTCCACTGGTCCCTGCTACGACAAAGG | SEQ ID NO. 189 |
| 43 | AATTACCACCAGACTAGAGTCAGGAGTCCTGGGCTGGTTCTGCTGT | |
| | ATGACACAGGACAGGTGGCTTGCCTGGTCTGGGCCACAGCCTCCTC | |
| | CCCTGTTGATGAGCATGTTGGTTGTTCCAGCACCATGTCAGCCCTA | |
| | GAAATCTCTGAATTCTTGACCAGATCAGTAATTGCTCTCTTGCGTT | |
| | TACTTTTCCTTCAAATAAAGAGATTGGCATACAGGGGAGGAGCCCA | |
| | GTACAGACGGCATGCTTGGCTCAGGTTCCAGAACCCAGAAACCAGA | |
| | CAAGAGTTGGGAAACCATGATGGTGGAGGAGGGTGTGCCACTCCTT | |
| | ACTAGTGCCTAATCTCTTCGAGACACTAATGTTTCAGTATTATCCA | |
| | CAGATTCTGATGCCAGGCAGCCCAGATGACTGGGGTCAGTTATTAG | |
| | CATGCTTCCTGGAGGTGGTTCCCAGGT[A/G]CAGGCTACCTGCAG | |
| | TCTGGCTGGATGGGCCCTGCACCACACTTGCTTCTGGGAAGCTGGT | |
| | TTTGGGGTTGCCACAATCTCTGAAAGAATCACTAGGCCACCCTCTG | |
| | AGTGGGTCCTTCTGTAGGAATTATGGATAAAATTGTTCCACTAGTC | |
| | TTACCTTCTTGGGGAACCCTTCCTGGATTCCCAGGCTGGGCTGGGT | |
| | GTCCCTGCAGCCTAGCCCCACAGCCCTCCTGCTTCTCTTTCTCATC | |
| | ACAGTCTTGTTATCTCTACCAACTGTAGGCCTGCCCCACTGATGGT | |
| | GTGAATAAAGGGACTGGGTCTCTCTAGCACCTAGCATAGATCTGAT | |
| | ACATAGTGGGTGATCTCTATTGAATGAACGATGAATGAATGAATGA | |
| | ATGAATACATTTAGATAATTCAGATTACTCTTTCTAGCTCAGCAGT | |
| | GTAAAGCAGGAAGACATGCTGTCAATATGATTTAGGGCAAGTTT | |
| KCP_1751 | AACGATGAATGAATGAATGAATGAATACATTTAGATAATTCAGATT | SEQ ID NO. 190 |
| 06 | ACTCTTTCTAGCTCAGCAGTGTAAAGCAGGAAGACATGCTGTCAAT | |
| | ATGATTTAGGGCAAGTTTTCAAATCTCTCTGGACCTCAGTTTTACC | |
| | TCTTGAAAAATAAATATAATAATTTGTCCTTACTTCATGAGACTAT | |
| | TTTGAAGATTAAATGAGATAATGTATACACTACTACTCACTGTCCT | |
| | TACTTGAATATTCCTAGGTCCTTGGTGCTACATTAGGCTACATAGA | |
| | ATGTATTTAAAGTAATAGAGTGGTATTTAATAAATATTCATTTTCT | |
| | TTCCCCAGAACTACCTTAAATTAATTTGTTGAAAGGACAGATGGAT | |
| | GGATGGTTGATGGAAGTAGCAGGCTTCCAGCAGCAGGGGATGGAGT | |
| | GAGTGTGTGGATACCGCTGGATCAGCAGAAGGTTATACCATTTTAG | |
| | AGTAACTATCTCGGACTTCGGAGAGTTCCTGGGTATGAAG[C/G]T | |
| | TTGGCTTTAATTAAAGTCTCAGCACAGTGTTAAATGCCATTTTATT | |
| | TTAGGTCATAATTAACACTAATGAGATGAGTGGATTACAAAGAGCA | |
| | CACATTTTGAGAAAGTGAAAAACAACATCTGAGCTTGGTGGTTTCC | |
| | ATTTTCGCTTTTCCCCCTCCCATGCTCTGTTCAATTAAAAGTTTTG | |
| | AGAAAATATTACAACCATACTCCTTGTCTTTGTGGTAATGAAGCAT | |
| | ATTAATTTGAATGTGATGAATACAATATTCCACTGACTTTTTTATT | |
| | CCCTTATCTACAAAAGTTTAAAATAATGGACCAATTAAACCAGGAG | |
| | AGAAGAATGCAGGGTTTGCCTCGGGATCCAATTCAGCAACCAGAGA | |
| | ACTGAAAGAACAAAATTTTTTGACGGAGTCTGGGCCAGACTTCATC | |
| | CCTTACCTATAGCTGACAAACAGTAAGTCAAATTGGGCAGATGTGG | |
| | ACCAGCGCAGAACACATACTATATTGAGGATCGAAAGGC | |
| KCP_1751 | GTGTAAAGCAGGAAGACATGCTGTCAATATGATTTAGGGCAAGTTT | SEQ ID NO. 191 |
| 70 | TCAAATCTCTCTGGACCTCAGTTTTACCTCTTGAAAAATAAATATA | |
| | ATAATTTGTCCTTACTTCATGAGACTATTTTGAAGATTAAATGAGA | |
| | TAATGTATACACTACTACTCACTGTCCTTACTTGAATATTCCTAGG | |
| | TCCTTGGTGCTACATTAGGCTACATAGAATGTATTTAAAGTAATAG | |
| | AGTGGTATTTAATAAATATTCATTTTCTTTCCCCAGAACTACCTTA | |
| | AATTAATTTGTTGAAAGGACAGATGGATGGATGGTTGATGGAAGTA | |
| | GCAGGCTTCCAGCAGCAGGGGATGGAGTGAGTGTGTGGATACCGCT | |
| | GGATCAGCAGAAGGTTATACCATTTTAGAGTAACTATCTCGGACTT | |
| | CGGAGAGTTCCTGGGTATGAAGGTTTGGCTTTAATTAAAGTCTCAG | |
| | CACAGTGTTAAATGCCATTTTATTTTAGGTCATAATTAAC[A/G]C | |
| | TAATGAGATGAGTGGATTACAAAGAGCACACATTTTGAGAAAGTGA | |
| | AAAACAACATCTGAGCTTGGTGGTTTCCATTTTCGCTTTTCCCCCT | |
| | CCCATGCTCTGTTCAATTAAAAGTTTTGAGAAAATATTACAACCAT | |
| | ACTCCTTGTCTTTGTGGTAATGAAGCATATTAATTTGAATGTGATG | |
| | AATACAATATTCCACTGACTTTTTTATTCCCTTATCTACAAAAGTT | |
| | TAAAATAATGGACCAATTAAACCAGGAGAGAAGAATGCAGGGTTTG | |
| | CCTGGGGATCCAATTCAGCAACCAGAGAACTGAAAGAACAAAATTT | |
| | TTTGACGGAGTCTGGGCCAGACTTCATCCCTTACCTATAGCTGACA | |
| | AACAGTAAGTCAAATTGGGCAGATGTGGACCAGCGCAGAACACATA | |
| | CTATATTGAGGATCGAAAGGCCAGGTTCCAGACCGTCCTCTAATAT | |
| | TTTCTTAGTGAATATTTGTTGGATGAATGCATGGATGGG | |
| KCP_1752 | CTTACTTCATGAGACTATTTTGAAGATTAAATGAGATAATGTATAC | SEQ ID NO. 192 |
| 52 | ACTACTACTCACTGTCCTTACTTGAATATTCCTAGGTCCTTGGTGC | |
| | TACATTAGGCTACATAGAATGTATTTAAAGTAATAGAGTGGTATTT | |
| | AATAAATATTCATTTTCTTTCCCCAGAACTACCTTAAATTAATTTG | |
| | TTGAAAGGACAGATGGATGGATGGTTGATGGAAGTAGCAGGCTTCC | |
| | AGCAGCAGGGGATGGAGTGAGTGTGTGGATACCGCTGGATCAGCAG | |
| | AAGGTTATACCATTTTAGAGTAACTATCTCGGACTTCGGAGAGTTC | |
| | CTGGGTATGAAGGTTTGGCTTTAATTAAAGTCTCAGCACAGTGTTA | |
| | AATGCCATTTTATTTTAGGTCATAATTAACACTAATGAGATGAGTG | |
| | GATTACAAAGAGCACACATTTTGAGAAAGTGAAAAACAACATCTGA | |
| | GCTTGGTGGTTTCCATTTTC[A/G]CTTTTCCCCCTCCCATGCTCT | |
| | GTTCAATTAAAAGTTTTGAGAAAATATTACAACCATACTCCTTGTC | |
| | TTTGTGGTAATGAAGCATATTAATTTGAATGTGATGAATACAATAT | |
| | TCCACTGACTTTTTTATTCCCTTATCTACAAAAGTTTAAAATAATG | |
| | GACCAATTAAACCAGGAGAGAAGAATGCAGGGTTTGCCTGGGGATC | |
| | CAATTCAGCAACCAGAGAACTGAAAGAACAAAATTTTTTGACGGAG | |
| | TCTGGGCCAGACTTCATCCCTTACCTATAGCTGACAAACAGTAAGT | |
| | CAAATTGGGCAGATGTGGACCAGCGCAGAACACATACTATATTGAG | |
| | GATCGAAAGGCCAGGTTCCAGACCGTCCTCTAATATTTTCTTAGTG | |
| | AATATTTGTTGGATGAATGCATGGATGGGTGGATGAATAGATGGAT | |
| | GGATGGACAGATGGACGGAGAGAGAGATGGATGAATGGATTGTTGG | |
| KCP_1768 | GCAGGCCTGTGAACCTGACACATGGTCCAGGTGTCTCCCTGAGGAC | SEQ ID NO. 193 |
| 36 | TTCTGGAAGTCTCCCCACCTCTCTGTGGTCCTTTAGGCATTAACAC | |
| | CACCTTGTCACTGTGTCTTCTGAGGCAGTCTGGAAGTTCATACCCC | |
| | ACAATCTCTGTGTACCTTGTCCCCCATTCTGTTCTCTGCATTGCAG | |
| | ATGGTTTAAAACACACACACATACACGCGCAAAATGTTGTTCCTTT | |
| | TCTTAAAACCCATTGTGGCCAGGCTAGACAAATCCTTAACACGGTC | |
| | TACAATATTCTGCATGGCATGGCCCCTGGGTGCCTCCCAACCTGAT | |
| | CTGTCACACACCACCTCCACCTTTGCCTGTTCCCTGGGCCCTAGCA | |
| | CTAACCTTTGGTTCATTCCTAGACACCTTTTCAGCACTTAGGCCCC | |
| | CACAGCCCTCAGAACCTTTACACTTGCTGTCTCTTTTGCTTTAA[A/ | |
| | G]TGTTCTTGCCCCACCTACCACCTAGTTAATGCCTTTTCCTCCT | |
| | TCAGCTCTTAGTTGAAGCATCACTTCCTCAAGGAGGGCAGCCCTGA | |
| | TGAAACTCATTATGCAAACTCCAGCCTGGGTTGGGCCTTATCTTTA | |
| | TGCTGTCATGGCCCTGAGTATTCTTCCTTTATGGCACCAATCACGG | |
| | CTTATATGATATACTTATGCTATTATTTGAGTTATGTCTGTCTCCC | |
| | CCAGTATGCCACTAGTATTAGAATCATTGATTTTTAATCATTGTAT | |
| | CCCTAGTGCTTAGCACAGAGCCTGGCTCATAATAGATGCTTAATAA | |
| | ATATTTGTTGAATAAATGAATGAGTGAATGAATAAATGCCTCATTC | |
| | AAGAGCTTTGGCTCTTTCTGTACTACTACATTACTTCTATTTTTTA | |
| | GCTCTTAATTCTCAAAGCACTTTCTTTGTGCTGGGCTTATGCTGGG | |
| | AGCTTAGACAGTAAAGCTTAGA | |
| KCP_1801 | TTACATCCACAGGTTTGATTATAAATGTGTGTATTGAATTGGAATT | SEQ ID NO. 194 |
| 73 | TCTGTTGAAATTCTGATCCCTTCTAGACAAAGAAGGTAAAAATTGA | |
| | AACATGTCAATGGATATCTAAATATCATTACTCACTGGCTTTATTT | |
| | GCAAATGGCTTTCCATTGACAACAGTTACATTTTGTTCAAAGCAAC | |
| | AAATGATTGGCGCTGACAATCCACAGGAACATGGTGCAGTCATTAA | |
| | TGAATGTGCTCATTATTCCTCCCTGCCGGGAGGCATCGACTCCCGT | |
| | TCTCCAGCCTGTTTTAAGCAGACAGACCTACATCTGCACCTGTCAG | |
| | CTTGGAACCCTAGTAGGGGAGGGGGATGCTGATGTGATGGAGAATG | |
| | AAGAATGGGCCCTGCAGGCTGACATTTTGGGAGAGTAGGTTCTGAA | |
| | ATTTATCCCAAAGGACATGGAATCCTGGAAGCAGGGTTCAAGATCC | |
| | TCCCAAAATTGATCTCCCAGGATGCTTGGAATGATTGTTC[C/T]G | |
| | AGGGTTTTGTAAAATGCCAGGGGAAAACCAGGAAGCTTCTCTCCAG | |
| | TTGTCTTGCCTCCTTCCTCTCCAGTCTCCATGGAGCTGACTTTGAG | |
| | AATTAACTCCTGAGGGACAGAGACCCTGGGATGGAGAGCCAGCCCT | |
| | GCTGGATTCCACAAGGTGCTGCTTAAAGCACAACACCTCTTCCCAA | |
| | TGACAGGTTCTGAAAGAAGGCCTTGTAGCTAGATGCACAGAGGGTT | |
| | TTGTTTTGTTTTTTTTTTTTTAACCTTTCAGCATCTGTCTAAAATT | |
| | GCTCTGGGCTGGGTACAGTGGCTCCCACCTGTAATCCCAACACTTT | |
| | GAGAGCTGAGGCAGGAGGATCGCTTGAGCCCAGGCGTTCTAGACCA | |
| | GCCTGGGCAATATAGTGAGATCTCTATGTCTAGAATGTTTTTTAAT | |
| | TAGCTGGGCTTGCTGCCTGCACCTGTAATTCCAGCTACTTGGGAGG | |
| | CTAAGGTGGGGGGATCACTCGAGCCCAGGGGGCTGAGGC | |
| KCP_1802 | CCTTCTAGACAAAGAAGGTAAAAATTGAAACATGTCAATGGATATC | SEQ ID NO. 195 |
| 37 | TAAATATCATTACTCACTGGCTTTATTTGCAAATGGCTTTCCATTG | |
| | ACAACAGTTACATTTTGTTCAAAGCAACAAATGATTGGCGCTGACA | |
| | ATCCACAGGAACATGGTGCAGTCATTAATGAATGTGCTCATTATTC | |
| | CTCCCTGCCGGGAGGCATCGACTCCCGTTCTCCAGCCTGTTTTAAG | |
| | CAGACAGACCTACATCTGCACCTGTCAGCTTGGAACCCTAGTAGGG | |
| | GAGGGGGATGCTGATGTGATGGAGAATGAAGAATGGGCCCTGCAGG | |
| | CTGACATTTTGGGAGAGTAGGTTCTGAAATTTATCCCAAAGGACAT | |
| | GGAATCCTGGAAGCAGGGTTCAAGATCCTCCCAAAATTGATCTCCC | |
| | AGGATGCTTGGAATGATTGTTCCGAGGGTTTTGTAAAATGCCAGGG | |
| | GAAAACCAGGAAGCTTCTCTCCAGTTGTCTTGCCTCCTTC[C/G]T | |
| | CTCCAGTCTCCATGGAGCTGACTTTGAGAATTAACTCCTGAGGGAC | |
| | AGAGACCCTGGGATGGAGAGCCAGCCCTGCTGGATTCCACAAGGTG | |
| | CTGCTTAAAGCACAACACCTCTTCCCAATGACAGGTTCTGAAAGAA | |
| | GGCCTTGTAGCTAGATGCACAGAGGGTTTTGTTTTGTTTTTTTTTT | |
| | TTTAACCTTTCAGCATCTGTCTAAAATTGCTCTGGGCTGGGTACAG | |
| | TGGCTCCCACCTGTAATCCCAACACTTTGAGAGCTGAGGCAGGAGG | |
| | ATCGCTTGAGCCCAGGCGTTCTAGACCAGCCTGGGCAATATAGTGA | |
| | GATCTCTATGTCTAGAATGTTTTTTAATTAGCTGGGCTTGCTGCCT | |
| | GCACCTGTAATTCCAGCTACTTGGGAGGCTAAGGTGGGGGGATCAC | |
| | TCGAGCCCAGGGGGCTGAGGCTGCAGTGAACCATGATTACACCACT | |
| | GAACTCCAGCCTGGGCAACAGAGTGAGACCCTGTCTCAA | |
| KCP_1840 | CTGATGGAACTGGGATGTGAGAAGAAGGCAGGTTTTCTGATAAACA | SEQ ID NO. 196 |
| 80 | ATTCCTGTATCTTTCACAAATGCCAAATCACAGACTCAGCTTGGGA | |
| | CATATGAGGACAGCACAGACTTTGGAGGCAGGTAGATTTTGGGTTG | |
| | TCACGCAGACACCCACTACTATGAGACCTGGATTTCCTTCTGACGT | |
| | TATTGGGGATAAGAAGTGGCACCTCACCATTTCTAGGAAATAGTAG | |
| | GTAAGTCTTTCTGGTTGCCACTGAGGTGACTCACCTGAGACACAGT | |
| | TGCTCCTAAAGTTCAAGGTTAGGAGACAATCCAGAAGGGGAGCTGT | |
| | CTGTGAAGTCAGAATTCTTGGAAGAATGTAAGTCTTTACACAGTAA | |
| | CAGCAAAGCAGACAGTGGGAACCACTACTCTGCCTTCTTGCATCAT | |
| | TCTTTCCTAGAAATACCAGAAAGCAGTGAGGGATTAAGTCTAATTC | |
| | CTGGCACCTGACCTTATATCTAACAGATGCTCAGTATTAC[C/G]T | |
| | GTTGATGGGACCTCACTGGGAATGTTTTGTGTGCAGTACAAAAGGG | |
| | CAATAGATGAAACTTTGGGACGGGAGCCCAGGAAAATGGCTGAGAG | |
| | GAGAGCTTATGCCTAGCTTATGCATGAGCTTGCAAAAAGGGAGAAT | |
| | ACACGGGAGGGAAGATCAGCAACAGCATGAGTTTTATAAGGCAGAG | |
| | AGTTGTTGGGAAGGAAGCAGCAGGGAGAGGGGAAGGAGTAAGTAGA | |
| | AACCTAGAAGAGATACAGCTAAGATAAGCCAAGAGAACAAAGTATT | |
| | GACTTACCAGAAACATGGAAGTCTTCCTGCTTCTAATTTAGTTCCG | |
| | CATATCTGGATATGTGAATGCCTAAAATCCCATTAAGCCCAGTGGG | |
| | TTAATTATTACACTTGCTAGGGCCCCAGAGGAGAGGAAACACAGTA | |
| | AGTCAGAAAAACCTCTGGGCAGGTGAATTTCTCAGGTTTTCTTCTG | |
| | GGCAGATGGGATCTGGAATGGTAGCGTGGCATCCTGGTA | |
| KCP_1855 | CCTTTCCAATATTAAAATAATATTAACATTGGTAATAGTGGTACTA | SEQ ID NO. 197 |
| 79 | AACAACTTAGGGTGTTTTTTTTTTCATTTAATAGTATATTTTTAGT | |
| | ATCTTTCCAGGAAAAGATACATGGATGTGCCACATTATTTTTAATG | |
| | GCTCACATGGTACTCCTTTTATGTATGCACTATAATTTATGGAACC | |
| | AGTTTTCTCACCGATGAGCATGTAAGTTCTTTCAGTCTTTTACTGT | |
| | TATAAACGAATGATGCAATGAATATCCTTGTACATATATATTTGTG | |
| | CGCATATGTAGGTATCCTTACAAGTGGAATTTCTGAATAAATGGAT | |
| | ATATACAATTTATTTATGAATTTACCTTCCTACAAGTGATTCAAGA | |
| | GAGTGTCTTTGCTCCACAGTGTTGTCAATATAGTGTATTCTCAAAA | |
| | TCTGACACCAATATGTGTGAAGTGCCTGCTCTGTTCCCACACTTTA | |
| | CACAGGTTCTCTTATTTG[C/A]GTTAAGTTTATTTAAGAAGAGGA | |
| | AACTGGGCCTCATGGAGATCTAGGAACTTGCCCAAGGACAGGTCTC | |
| | TGTGACTCTAAGAGTGCAATCTTCCCTTTTCCCCATGTCAAGCACC | |
| | TTTCCCCACCAGGCTCACTGCTGACAATCCAGTGTACGAAGAAGGG | |
| | AAATTACCCCCACAGAGCCCAAAAGTTTAGGACATGCCGACAGCAT | |
| | CACTCTTTTGCCTCCTCATTCTCTCTTTCATTTCCAGAACATTTGC | |
| | TCACTCAGTGCTGCCCAGTGATACTTAGCCAGCCTGATTACCCATC | |
| | TAATAATTTCTGATACTAATATAAAACCTTCCCAAAGACAAATATA | |
| | ACTGAGACGCACTCCAGCTTACCATAGCTTTCCTGGTGGTACAGTT | |
| | TCCAGGGACATTTCACTGTGTCAAAGCAGGGACCACATATGTTCCA | |
| | GACCAGCTTGTTGGGTTTTTCACTGGGAAGTGAAGACAAATTGTTG | |
| | TCCCTT | |
| KCP_1860 | TTCCCACACTTTACACAGGTTCTCTTATTTGCGTTAAGTTTATTTA | SEQ ID NO. 198 |
| 48 | AGAAGAGGAAACTGGGCCTCATGGAGATCTAGGAACTTGCCCAAGG | |
| | ACAGGTCTCTGTGACTCTAAGAGTGCAATCTTCCCTTTTCCCCATG | |
| | TCAAGCACCTTTCCCCACCAGGCTCACTGCTGACAATCCAGTGTAC | |
| | GAAGAAGGGAAATTACCCCCACAGAGCCCAAAAGTTTAGGACATGC | |
| | CGACAGCATCACTCTTTTGCCTCCTCATTCTCTCTTTCATTTCCAG | |
| | AACATTTGCTCACTCAGTGCTGCCCAGTGATACTTAGCCAGCCTGA | |
| | TTACCCATCTAATAATTTCTGATACTAATATAAAACCTTCCCAAAG | |
| | ACAAATATAACTGAGACGCACTCCAGCTTACCATAGCTTTCCTGGT | |
| | GGTACAGTTTCCAGGGACATTTCACTGTGTCAAAGCAGGGACCACA | |
| | TATGTTCCAGACCAGCTTGTTGGGTTTTTCACTGGGAAGT[A/G]A | |
| | AGACAAATTGTTGTCCCTTTGAAAAAGCATCTTTCATCTCTCCATC | |
| | TATCTGCGATCTAAAGCAATGGGGCTCTTTCTGTATGTCTTTCAAA | |
| | TGGTCTACACTGACACACGTTTTCTCTGAGCTGCCGAGAGAATATG | |
| | CCATGAGATGTTGCCAGTGATGGTTACACTCAGCTAGCAGAAGATT | |
| | AGGGACTGGTTAAACCTTTGGAGAAATTGCCTTGGGAAAAGAGGAA | |
| | ATAAAAGCAAATATTACTATGAAACATAGAGATTACCAcGTAGGAG | |
| | GAGGAGAGAGGTGGAGGGAGGGGTAGGAGTGGAAGGAAGGGAGGGA | |
| | GGCAGAAAGAGGAAGGCAGACTGGTGGAAAATAAACCGTGCACTTT | |
| | AGAACAGCAGGAAGGGAGGCTTGGAAGCCTGGTTTTCTGGCTTTGA | |
| | ATGACCGCCTAGCGCTTGCCGGTGCGCCAGGGTGCTGTGAGGATGT | |
| | GGGCAGAGGGCGAGTCCGAAGGGCTCCAGACACTGGGAA | |
| KCP_1866 | GAGAATATGCCATGAGATGTTGCCAGTGATGGTTACACTCAGCTAG | SEQ ID NO. 199 |
| 79 | CAGAAGATTAGGGACTGGTTAAACCTTTGGAGAAATTGCCTTGGGA | |
| | AAAGAGGAAATAAAAGCAAATATTACTATGAAACATAGAGATTACC | |
| | AGGTAGGAGGAGGAGAGAGGTGGAGGGAGGGGTAGGAGTGGAAGGA | |
| | AGGGAGGGAGGCAGAAAGAGGAAGGCAGACTGGTGGAAAATAAACC | |
| | GTGCACTTTAGAACAGCAGGAAGGGAGGCTTGGAAGCCTGGTTTTC | |
| | TGGCTTTGAATGACCGCCTAGCGCTTGCCGGTGCGCCAGGGTGCTG | |
| | TGACGATGTGGGCAGAGGGCGAGTCCGAAGGGCTCCAGACACTGGG | |
| | AATAGTGGTGGTCGTGTGCTCCTCCCTGAAACTTTTGCACTACCTC | |
| | GGACTGATTGACTTGTCAGACGGTAAGCGAACCCTGGAGCTTCCCC | |
| | GTTTTCTGTGAATGTGTTTTTGTGGCTTCGGTTGCTGTGA[C/G]A | |
| | GTCGTTTCGAAAATGCACGGAAATGAGGGCGGAGACCCGAGAGATT | |
| | TGAAAAAGCCGGGCTGAAACAGCGTGGTATTGGTCCCCGCCTCCCC | |
| | AGTCGCGCCCCAGTGCTGCGCTGTCCGTCGTGCTGAAATGTGGTGC | |
| | GCCTGGGGAGTGCGGGAGCCAGGAAGTTAGGGTCTCCTGCTCCGGC | |
| | CCTATGAGCATGTGAGTCTTGATGGATTATTAGCTATGGGTGAGGC | |
| | CAGCACAACACATCACAATTCTCTCTGAAGCTGTCTGGTAACTACG | |
| | TATATTGTTGATGGAAGCCAGTGACTTTTAAAAGCCATTATGTTGA | |
| | TTAACTTTTTTAAAGAAGTTTAGGAGATTATATGGAGGTAAAAACC | |
| | TTTGTAAATGCTAATCACAGTGTCTGACAATTAGAAACACATTTAA | |
| | TAAATGTCAGTTTCTTTGCTCAACCCTTATAAGAACCCTTATTCCA | |
| | AAGCCACCTCCTCAGCTCTGACTTCAGCTCCATTCCTTA | |
| KCP_1871 | TGCTGTGACAGTCGTTTCGAAAATGCACGGAAATGAGGGCGGAGAC | SEQ ID NO. 200 |
| 16 | CCGAGAGATTTGAAAAAGCCGGGCTGAAACAGCGTGGTATTGGTCC | |
| | CCGCCTCCCCAGTCGCGCCCCAGTGCTGCGCTGTCCGTCGTGCTGA | |
| | AATGTGGTGCGCCTGGGGAGTGCGGGAGCCAGGAAGTTAGGGTCTC | |
| | CTGCTCCGGCCCTATGAGCATGTGAGTCTTGATGGATTATTAGCTA | |
| | TGGTGAGGCCAGCACAACACATCACAATTCTCTCTGAAGCTGTCT | |
| | GGTAACTACGTATATTGTTGATGGAAGCCAGTGACTTTTAAAAGCC | |
| | ATTATGTTGATTAACTTTTTTAAAGAAGTTTAGGAGATTATATGGA | |
| | GGTAAAAACCTTTGTAAAATGCTAATCACAGTGTCTGACAATTAGA | |
| | ACACATTTAATAAATGTCAGTTTCTTTGCTC[A/G]ACCCTTATAA | |
| | GAACCCTTATTCCAAAGCCACCTCCTCAGCTCTGACTTCAGCTCCA | |
| | TTCCTTAGTGAGAATGGGGTTATAAATCCAGGTTAACCCGATTGTT | |
| | TAGGATTAGAAAGTGATTTGGTTTCCAACGTTGAAGGAGTTCAAGA | |
| | AACAAAGAGTTTTATTTTTCCTCCTTATGAGATATTGTTCCAAATA | |
| | GAACACAGTTTGTCTAGATGATTTTTGTCACTTAAAATTAGGCTCC | |
| | AGGAAAGATTCCAAATTTCATGAGCAATTGGGCTCATAAAACAAGA | |
| | TCAAACTCCAATAGTGTATATCCAAAGTATGTATAATGTGTATTCG | |
| | GTGTATATTCTTCCACCACTGCATGGTGTAGACAGAATTTCTCTTC | |
| | CAAGGGGCACCACATGACAAAACCGTACATAATAATGAAATGCATT | |
| | TGTAGACAAAGGACTAGCTAAAATACCAACTGAAAGTGGGAAGACC | |
| | AGAAACTGAAG | |
| KCP_1872 | AATTGCCTTGGGAAAAGAGGAAATAAAAGCAAATATTACTATGAAA | SEQ ID NO. 201 |
| 58 | CATAGAGATTACCAGGTAGGAGGAGGAGAGAGGTGGAGGGAGGGGT | |
| | AGGAGTGGAAGGAAGGGAGGGAGGCAGAAAGAGGAAGGCAGACTGG | |
| | TGGAAAATAAACCGTGCACTTTAGAACAGCAGGAAGGGAGGCTTGG | |
| | AAGCCTGGTTTTCTGGCTTTGAATGACCGCCTAGCGCTTGCCGGTG | |
| | CGCCAGGGTGCTGTGAGGATGTGGGCAGAGGGCGAGTCCGAAGGGC | |
| | TCCAGACACTGGGAATAGTGGTGGTCGTGTGCTCCTCCCTGAAACT | |
| | TTTGCACTACCTCGGACTGATTGACTTGTCAGACGGTAAGCGAACC | |
| | CTGGAGCTTCCCCGTTTTCTGTGAATGTGTTTTTGTGGCTTCGGTT | |
| | GCTGTGACAGTCGTTTCGAAAATGCACGGAAATGAGGGCGGAGACC | |
| | CGAGAGATTTGAAAAAGCCGGGCTGAAACAGCGTGGTATTGGTCCC | |
| | CGCCTCCCCAGTCGCGCCCCAGTGCTGCGCTGTCCGTCGTGCTGAA | |
| | ATGTGGTGCGCCTGGGGAGTGCGGGAGCCAGGAAGTTAGGGTCTCC | |
| | TGCTCCGGCCCTATGAGCATGTGAGTCTTGATGGATTATTAGCTAT | |
| | GGGTGAGGCCAGCACAACACATCACAATTCTCTCTGAAGCTGTCTG | |
| | GTAACTACGTATATTGTTGATGGAAGCCAGTGACTTTTAAAAGCCA | |
| | TTATGTTGATTAACTTTTTTAAAGAAGTTTAGGAGATTATATGGAG | |
| | GTAAAAACCTTTGTAAAATGCTAATCACAGTGTCTGACAATTAGAA | |
| | CACATTTAATAAATGTCAGTTTCTTTGCTCAACCCTTATAAGAACC | |
| | CTTATTCCAAAGCCACCTCCTCAGCTCTGACTTCAGCTCCATTCCT | |
| | TAGTGAGAATGGGGTTATAAATCCAGGTTAACCCGATTGTTTAGGA | |
| | TTAGAAAGTGATTTGGTTTCCAACGTTGAAGGAG[G/T]TCAAGAA | |
| | ACAAAGAGTTTTATTTTTCCTCCTTATGAGATATTGTTCCAAATAG | |
| | AACACAGTTTGTCTAGATGATTTTTGTCACTTAAAATTAGGCTCCA | |
| | GGAAAGATTCCAAATTTCATGAGCAATTGGGCTCATAAAACAAGAT | |
| | CAAACTCCAATAGTGTATATCCAAAGTATGTATAATGTGTATTCGG | |
| | TGTATATTCTTCCACCACTGCATGGTGTAGACAGAATTTCTCTTCC | |
| | AAGGGGCACCACATGACAAAACCGTACATAATAATGAAATGCATTT | |
| | GTAGACAAAGGACTAGCTAAAATACCAACTGAAAGTGGGAAGACCA | |
| | GAAACTGAAGTGTAAGATGAGGTAAGCCCTGGAGTAAGAGTCAAGA | |
| | AATCCACTTTCTATCCATAATCTGCTCTGGTTTAATGTTGGTCAAG | |
| | TCATTTTTTAAAAAATTCTAGGTCTTGGTTTCCTTATGATGACTTT | |
| | AGATCTCTGTTCCTTGGAATTCTAGAGTGATCCAAAGGTTTCTTTG | |
| | AATTCAGTTTTGTGGGTTGAGACGGGCAGCCAGACTGTGAGTCCCT | |
| | CAGCTCTGCTTCAACCAGAACAGCTCCACTTTACTGTTCAGCATGT | |
| | TAGCCCTGTATGTAAGGATGTTTTTTAGCTTTAGCTAAAATTTAGT | |
| | GACTCTATGACCCTAAGGCCCTGCTTCCCTGAGATTTTGAAAGCTG | |
| | AAGCACATTCGGAAAACTTTTTCTTCCTTAAAAATCACCTGAAATC | |
| | TGACAATCTGGAAGACTAGTTCTGTCTGCTCCAGCCCTTGGTCCCT | |
| | TAGATGTGCTTTTCTGAAGATCCAAACTCAACCTGCCAGTCAATAT | |
| | ACCAACTGAGCAGAGCCCCTGTTCTCCACCAGATTTCAAGAGAACA | |
| | TGTTCCATTCCTGTTCAGAGCTTCAGAGCAGCTTCCGCTAAGATTG | |
| | CACATTAATGCAACAGCGTCCTATTTTCTTTGTTTCTTTTTTTTTT | |
| | TTTTTTTTTTTTTTTGATGAGACAGGG | |
| KCP_1876 | ATTTTTCCTCCTTATGAGATATTGTTCCAAATAGAACACAGTTTGT | SEQ ID NO. 202 |
| 88 | CTAGATGATTTTTGTCACTTAAAATTAGGCTCCAGGAAAGATTCCA | |
| | AATTTCATGAGCAATTGGGCTCATAAAACAAGATCAAACTCCAATA | |
| | GTGTATATCCAAAGTATGTATAATGTGTATTCGGTGTATATTCTTC | |
| | CACCACTGCATGGTGTAGACAGAATTTCTCTTCCAAGGGGCACCAC | |
| | ATGACAAAACCGTACATAATAATGAAATGCATTTGTAGACAAAGGA | |
| | CTAGCTAAAATACCAACTGAAAGTGGGAAGACCAGAAACTGAAGTG | |
| | TAAGATGAGGTAAGCCCTGGAGTAAGAGTCAAGAAATCCACTTTCT | |
| | ATCCATAATCTGTCTCGGTTTAATGTTGGTCAAGTCATTTTT[T/A] | |
| | AAAAAATTCTAGGTCTTGGTTTCCTTATGATGACTTTAGATCTCT | |
| | GTTCCTTGGAATTCTAGAGTGATCCAAAGGTTTCTTTGAATTCAGT | |
| | TTTGTGGGTTGAGACGGGCAGCCAGACTGTGAGTCCCTCAGCTCTG | |
| | CTTCAACCAGAACAGCTCCACTTTACTGTTCAGCATGTTAGCCCTG | |
| | TATGTAAGGATGTTTTTTAGCTTTAGCTAAAATTTAGTGACTCTAT | |
| | GACCCTAAGGCCCTGCTTCCCTGAGATTTTGAAAGCTGAAGCACAT | |
| | TCGGAAAACTTTTTCTTCCTTAAAAATCACCTGAAATCTGACAATC | |
| | TGGAAGACTAGTTCTGTCTGCTCCAGCCCTTGGTCCCTTAGATGTG | |
| | CTTTTCTGAAGATCCAAACTCAACCTGCCAGTCAATATACCAACTG | |
| | AGCAGAGCCCCTGTTCTCCACCAGATTTCAAGAGAACATGTTCCAT | |
| | TCCTGTTCAGAGCTTCAGAGCAGC | |
| KCP_1893 | CTCTAAAATTTCACCCTCTGTTCTGTACACCAAGTACCTCAGCAAG | SEQ ID NO. 203 |
| 31 | TAATCCAGTTCCAGATGGGATCTGCAGTCTGCCATTAAGTCTTTAC | |
| | CACACATAGGCTCTTATGCTAGAGCCCTTACCATATGGTCCAAAAT | |
| | GCCATTTTTAATGTGTATTTGATATGGAGACTCTGTTCACAATTTG | |
| | AGTACTAAAGAGAGAATACCACCTCCTAGTAGATACACCAGGACCA | |
| | ATGTAATGCTGTCATTCTAAGGAGAGCAGTGGAACATCTCCAAAGA | |
| | ACCCATCTGTAGTCTTCCTTCGGCCCTTGATCTTATTCCTATTTTA | |
| | TTTTTAAGGTTTTTTTTTTTTTCTTCGAGACTAAATCTCACTCTAT | |
| | CACCCAAGCTGGAGTGCAGTGGCATGATATCAGTTCATTGCAACCT | |
| | CTGCCTCCCGGACTCAAGCGATTCTCCTCACTCAGCATCCCAAGTA | |
| | TCTGGGACTACAGGCATACACCACTATGCCCAGCTAGTGT[A/G]T | |
| | GTGTGTGTGTGTGTGTGTGTGTGTGTGTGTGTGTGTGTGTTAGTAG | |
| | AGACAGGGTTTCACCATGTTGCCCAGGGTGGTCTTGAACTCCAGAG | |
| | CTCAGGCGATCCACCTGCCGAGGCCTCCCAAAGTGCTGGGATTACA | |
| | GGCATGAGCCACAGCGCCTGGCCAATCTTTTAGGGATAATTTTAGA | |
| | ACAGTATACAGATATTGAGCCAAGAGTCAAAAGAGCTGGGTTGCAA | |
| | TTCTGGTTGTGCCATTTATCAGTTGTGTGAGGTGGGACAAGTCTCT | |
| | TTTTCTCCCTAGCTTTCTCTTTCCTCATTTATAAAATAAAGAAATG | |
| | AGAATGATAGTTGTATTAATTTCTGAGGACTGCCAGAACAAATTAC | |
| | TACAAACTGGGTGGCTTAAAACAACAAACATTTATTCTCACATAGT | |
| | TCAGGAGGCTAGCAGTTTGAAATCAAGTTCTTGACAAACTCCCCTA | |
| | GAGTCTAAAGTCTCTAGAGAAGGATTCCTCCTTGCCTCT | |
| KCP_1927 | GAGCAAGCACTGCAGCCATCCTCCTTTATTTCCCTCAAGGCAATAT | SEQ ID NO. 204 |
| 42 | CCAAGGATTAAAAAGTCAGAGCCGTCTGCAGATTCCTCCTCTCTAC | |
| | CTTGCCCTGCACTTTTTGTGCCCTTCCTCTTCCCCCTCTCCAGCCC | |
| | CAAACCTCTCTCCTGATCCACGGTACTCCTCCTGGGATGTCCACTG | |
| | GGGCTGATCCTCCCCCATTCTCCCCCTGAGTTCCCTGCTGTTAATC | |
| | TGTCTCCAGCAAAATTAACCTAGCCTATGTCCCATGCCCTCTGGAC | |
| | TCTGGCTGCTCGTCAATCACTCTTAAAAATCCGGTTTCTCCTTAGG | |
| | CAATCATTTTGTTTTGATTTTATGTGTAAAAAAACCTGAGTAAATT | |
| | TTTTTTTTTTTTGAGATGGAGTCTTGCTCTGTTGCTCAGGCTAGAG | |
| | TACAGTGGCATGATTTCTGCTCACTGCAACCTCCGCCTCCCGGGTT | |
| | CAAGCGATTCTCCTGCCTCAGCCTC[T/C]TGAGTAGCTGGGACTA | |
| | CAGGTGCCCACCACCATGCCTGGCTAATTTTTGTATTTTTGGTAGA | |
| | GACAGGGTTTCATCATACTGGCCAGGCTGGTCTCAAACTCCTGACC | |
| | TTGTGATCCACGCACTTCGGCCTCCCAAAGTAATCACTGCTGGGAT | |
| | TACAGAAGTGAGCCACCGTGCCTGGCCAAACCTAAGTAAATGTTTT | |
| | AAAATTATACTACTAACATAGCATACAGGCTTTAGACTGTTGGTTG | |
| | CTTTTAAGTTTGCTTACTTTAAAAGCTAGAGAGAAGATGGTTGAGG | |
| | TGATCTTGTCTCCTTCAGTATTCACTCTGAGCCATGCCTCCTGAGG | |
| | AAGTTTGCTTTAGGGGAGGCATTGCTATGTTATACACTCTACGATG | |
| | CACCAGCCCTTGCCTCAGAAGGCAAGGTTTGAACCCCAACACTGTC | |
| | TTTTGCAAACTGTTACCTTAGGAAATAGATTTTATCTCCTTAACTC | |
| | ACTTTTTA | |
| KCP_1931 | GTTCAAGCGATTCTCCTGCCTCAGCCTCTTGAGTAGCTGGGACTAC | SEQ ID NO. 205 |
| 93 | AGGTGCCCACCACCATGCCTGGCTAATTTTTGTATTTTTGGTAGAG | |
| | ACAGGGTTTCATCATACTGGCCAGGCTGGTCTCAAACTCCTGACCT | |
| | TGTGATCCACGCACTTCGGCCTCCCAAAGTAATCACTGCTGGGATT | |
| | ACAGAAGTGAGCCACCGTGCCTGGCCAAACCTAAGTAAATGTTTTA | |
| | AAATTATACTACTAACATAGCATACAGGCTTTAGACTGTTGGTTGC | |
| | TTTTAAGTTTGCTTACTTTAAAAGCTAGAGAGAAGATGGTTGAGGT | |
| | GATCTTGTCTCCTTCAGTATTCACTCTGAGCCATGCCTCCTGAGGA | |
| | AGTTTGCTTTAGGGGAGGCATTGCTATGTTATACACTCTACGATGC | |
| | ACCAGCCCTTGCCTCAGAAGGCAAGGTTTGAACCCCAACACTGTCT | |
| | TTTGCAAACTGTTACCTTA[G/A]GAAATAGATTTTATCTCCTTAA | |
| | CTCACTTTTTACATTTGCAAAATGGGTAAATTGTGACTACCTCACA | |
| | TGGATGTCATGAGATGAAATGTAAGAATGTGTGTCCCTGGCATATA | |
| | GTAACCACTTTCGCCAAAGACTGAGTTATCCAACTACAGACAGAGA | |
| | ACAGCTGGTGGCCTAATCAAAGGGAGATACAAAATAACAATGCCAA | |
| | GACTGGAAAAGGAAGTTCATCTTAGGATTTCCAAGAGAAAAAGAAA | |
| | TATGACTGTATTATAATAGGTATATTTATTAAGCTCTTACCATGTG | |
| | CCAAGCAAAGTTCTTTATATACATGATATACTTCATATACATTATT | |
| | TCATTTAGTCCTCATGGCTACCAGGTGAGCACCATTATTTTCCCAT | |
| | TTTACAGATGAGGCACAGAGAAGTTAAGCCACTTACCTAGGAAGGG | |
| | CAGTCCTAGTTAAGAAGCTGGGATTCAAATCCAAGAGGCTGGATTC | |
| | CAGACCTCAGG | |
| KCP_1939 | TTATAATAGGTATATTTATTAAGCTCTTACCATGTGCCAAGCAAAG | SEQ ID NO. 206 |
| 56 | TTCTTTATATACATGATATACTTCATATACATTATTTCATTTAGTC | |
| | CTCATGGCTACCAGGTGAGCACCATTATTTTCCCATTTTACAGATG | |
| | AGGCACAGAGAAGTTAAGCCACTTACCTAGGAAGGGCAGTCCTAGT | |
| | TAAGAAGCTGGGATTCAAATCCAAGAGGCTGGATTCCAGACCTCAG | |
| | GCTCTATTATGAGAAGTACCTAAATAGACATTGGTTTAACCAAAGC | |
| | CTGAGTCCCAACTAAGGGCAAGACTGTGACACAGAGGTCACTAATC | |
| | AGAATGAAAGATTGAGCCAGAGTTGAGTTGTTGGAATGTATTTTGG | |
| | TACATTTAGGTTGTTTTAAGTATATCAATCTCCATTCCACTCAATG | |
| | GTTGAGTTCAGTTTCAAGTTTTCCAAATGCTTTATGGGAAAGTCAT | |
| | ATTTTTCTCCCATTGCAGCAGGGATGCCAGCGCAGCCATG[C/T]T | |
| | TCTCAACCACCAAGTAGAAGCAAAGCCAAACTGACCCAAGAAGATG | |
| | AACAGAGGGAATCCAGGGAGTTCCAACTTGGGTTCACAGCTGCAAT | |
| | TCTCAAAGGATGGACTAAGCCATGTCACCCCTCCAGATAACACAGT | |
| | CATATTAATAGTGACCTTTTGGAGGCCTCCCTAAACAGCAGGTGAA | |
| | GTCCCAAAATCATTAGATTATTCCTGGCCTCAATTGTGGCCCAGAG | |
| | GGAGAGCCCTAAGATTTTTCCATGGGAACAAAGATCTAAATTCTGG | |
| | GACTATCTGGGCCATGTCCACCCTGCACCATTTACTACAAAATGGG | |
| | CTGATCCTATGGAAGCACACTACCTGTGTTGTGGTCATATAGATCA | |
| | TCACCTGGCTTCTCCAGGGCTAACCAGTTAGCATGGAAATGGGACA | |
| | CCCAAGAACAAGAGGATAGAAAGAAGGGAAGGGTGGAAAGAAGGAA | |
| | GGAAGAAAGGGTGGGAGGGAGGGAAGAGTGGTAGTTTTG | |
| KCP_1946 | TCCTGGCCTCAATTGTGGCCCAGAGGGAGAGCCCTAAGATTTTTCC | SEQ ID NO. 207 |
| 16 | ATGGGAACAAAGATCTAAATTCTGGGACTATCTGGGCCATGTCCAC | |
| | CCTGCACCATTTACTACAAAATGGGCTGATCCTATGGAAGCACACT | |
| | ACCTGTGTTGTGGTCATATAGATCATCACCTGGCTTCTCCAGGGCT | |
| | AACCAGTTAGCATGGAAATGGGACACCCAAGAACAAGAGGATAGAA | |
| | AGAAGGGAAGGGTGGAAAGAAGGAAGGAAGAAAGGGTGGGAGGGAG | |
| | GGAAGAGTGGTAGTTTTGGAAGGAAGGAGGGAATCAGAGCTAAAGA | |
| | TAATACATGATATGAGTCAGTGTTCAATGTCCCTGAAGATTAGGGG | |
| | AATCAAGCTTTGCTTCCAGGAGAATTAACACAGGAGAGCCAACAGA | |
| | GATGTGGAAATTTAGGAAGTCAGAGGAGACATTCTTTCA[T/C]TC | |
| | ATTCATTCGTTCATTCATTCACTTGCTCATTTTTACATGAATTGAC | |
| | TCTAGAACAGATGCTGGAGATACAAAGATGCATGAGACTTGCCCCC | |
| | ATCCTCAACAGTCATTCACAGTCTAATCAGAAAGAGAGCCTTGCAT | |
| | TTGGAATACAATATGGAGTAATAATACCTCTGTGTTCAGCCTGCAC | |
| | AAAATACTCTGTATGCATGGTCATATGTCCCTTGAAACAACTTTAT | |
| | GAGGAAGATACTACTATAGTCTCCATTTGACAGATAAGGAAACTGA | |
| | GGCTTAGGGAGGTCAAATAACTTGCCCAAGTAAAACAACTAGTAAG | |
| | TAGCTGAACCACAAAACAGAGATTCATGCAGAAAGCTGTACAACAG | |
| | AAGAAACCAGGACTACATCTGCCTCAAAGGAACCAGAGAAGGCTTC | |
| | CAAAGAAGGCAGCATTTTAAATGGGTTTTGAAGGATGTATAGCA | |
| KCP_1965 | CCCAGCCCTCAGGCACATCAGTGCCCTCTCTAGGCTCTCTCTCACC | SEQ ID NO. 208 |
| 48 | AACTTTAGAATTGAATTACATCAGTTGTTTCCAGATGGTGATCTGC | |
| | AGAATTCCTTTAAAGACCACCTGTGGGATTTGAGGGAGGAAAACTA | |
| | CACTCTCCCAATCTCCCTCTTTAACCCAAGCATCTGATTGCTTTCA | |
| | TCTGTTTTACATACTTAGCTTCTGTGCACAACTTCCTTTGATTAAA | |
| | GAGTTCCTTGCCTTTATAGTAGTGGATGATATCTAAGGATGATGTA | |
| | AAATACTGGGTGTTAGCTAAGGTTTTACCAAACTTAAAGCCTTTAT | |
| | GCTTCATAATTCCACTTTATTGATGTAGGAAGACAAATGATAGACT | |
| | TACTTTCAAGGTGGATAGAAGGGATGCGACCTAGCCAAGGCTACAG | |
| | CATTTCTCT[A/G]TGGCACCACTGCCATGACAACCATCAGTTTGA | |
| | ATGCCTTATGGGTGCATCCTATGGGTTATGCACTGGCCCCAAGCCA | |
| | TAACCCCTAGGACTCTAGAGCCAGCAGCAAACACAAAACACTGAAT | |
| | TAATAATGAGTGAGATCTCTGTTCCCATAGCTGCCACAGGCTAAAT | |
| | AAGTTGAGGGGGTATTGTAAAACCCAAGATGAGATCACTGAGCCTC | |
| | TGGTATCAAAAAGGTGTATTTCACAGAATGTTTAGTTGGACGAGAG | |
| | CTTGAAGAGCATGGAAACGATCTGGTATCATTCTGGTCAAAGACCA | |
| | GAATTTAGACCCCAGTTCTGCCATTTGCTGACTAATGACTTTGGGC | |
| | AAAATACTTAACTTTCCTGAGAGTTAGTTTCCTCATCTATAAAGTG | |
| | GGGTAATATAACCCACCTTGCAGGATACTGGTAGGATTA | |
| KCP_1976 | AGCAGGGTCCCCTGAGCGTTCCTCCTCAGCTCCCAACACTTCCCTC | SEQ ID NO. 209 |
| 78 | CAGGCACCAGTATGCAGGGCAAGGTCCTGGAGGGGGCGCCGAAACA | |
| | CCACTCGAGATCCTCACTCTCAGGAATTCAATATAGAAAACACATT | |
| | AAGACCTCTTTACATGGAACTGCTGTTTATAATTATTGTTCCCTAT | |
| | GGGATATTCCCCACTGCTTCCTCCAATCCTCTTTTAAACTGCTCAA | |
| | CTAATAGAGTTTTCCTGGCTTCCCCAGGGAGACATTCACAGATGCT | |
| | AATAGAGACATAATTCAAAAATTGCTTGATATACATGCCCTCAATT | |
| | TTCCCCAAGAACCACCTAAGTAAAGAGCCCCAGACATGCAACACAT | |
| | TCATTGGCCAGATGCAATTTAACATGCGTGGGATTAAATATACAGG | |
| | CTACTACAGCCAGGTTGTCATCAAGCAGCAGCAGGCATGGCATTTT | |
| | ATCCTAAGGTACCACCA[T/C]GGCCAAATGCAACAGGAAAGAAGC | |
| | AGGCTGCTGGGTGGGACCCCTGGAAGATCCCCTCCTCTGTAATTTC | |
| | CACTGCAAGCTTTTCCCAGGCCTTTTCAGGCAAAGCGGGGAGTTTT | |
| | GAAAATAAATCCCCCAGGCTTGGAGAAGCAAAGAATCAATGCTAAG | |
| | CAGCTCCGGAAATAATAGCTTCCATCTCTCTGATATATAAAGAGGA | |
| | TAAGGAAGGCAGAAAGAAGGGGCATGATATTATGAGATTGCAACAA | |
| | TACATTGCAACATTACATTAAAGAATTACAGAAAGCAAGATCTAGC | |
| | TTCAGATGCCAGTTCATGCACTTACTCCCTGTGTGACCCTGGGAAT | |
| | CACTTAAGCTGTCTGAGACTTAGCTTGTCTAATGACAAACTGGGGA | |
| | TACTAATATCACCTCCCAGGATTGTTGGGAAGGTAAATGGAGATTG | |
| | ACAAATGTGAACACACTTAGTATGTCTTT | |
| KCP_1977 | TGTTTACATGGAACTGCTGTTTATAATTATTGTTCCCTATGGGATA | SEQ ID NO. 210 |
| 75 | TTCCCCACTGCTTCCTCCAATCCTCTTTTAAACTGCTCAACTAATA | |
| | GAGTTTTCCTGGCTTCCCCAGGGAGACATTCACAGATGCTAATAGA | |
| | GACATAATTCAAAAATTGCTTGATATACATGCCCTCAATTTTCCCC | |
| | AAGAACCACCTAAGTAAAGAGCCCCAGACATGCAACACATTCATTG | |
| | GCCAGATGCAATTTAACATGCGTGGGATTAAATATACAGGCTACTA | |
| | CAGCCAGGTTGTCATCAAGCAGCAGCAGGCATGGCATTTTATCCTA | |
| | AGGTACCACCACGGCCAAATGCAACAGGAAAGAAGCAGGCTGCTGG | |
| | GTGGGACCCCTGGAAGATCCCCTCCTCTGTAATTTCCACTGCAAGC | |
| | TTTTCCCAGGCCTTTT[C/T]AGGCAAAGCGGGGAGTTTTGAAAAT | |
| | AAATCCCCCAGGCTTGGAGAAGCAAAGAATCAATGCTAAGCAGCTC | |
| | CGGAAATAATAGCTTCCATCTCTCTGATATATAAAGAGGATAAGGA | |
| | AGGCAGAAAGAAGGGGCATGATATTATGAGATTGCAACAATACATT | |
| | GCAACATTACATTAAAGAATTACAGAAAGCAAGATCTAGCTTCAGA | |
| | TGCCAGTTCATGCACTTACTCCCTGTGTGACCCTGGGAATCACTTA | |
| | AGCTGTCTGAGACTTAGCTTGTCTAATGACAAACTGGGGATACTAA | |
| | TATCACCTCCCAGGATTGTTGGGAAGGTAAATGGAGATTGACAAAT | |
| | GTGAACACACTTAGTATGTCTTTACATAGTAGGTATTCAATAAACT | |
| | CTTCTATATATCTTCTCTTTCTGAAAATCTGAATATGGGGAGCATG | |
| | GATATG | |
| KCP_1989 | GTCCCCACCACTCCTTTTTATTGCAGAGGGAATTGACATTCAGGGA | SEQ ID NO. 211 |
| 33 | ATGGAAATGCCCAGCCCAGAATTGGGGATGTGGTCTGGGAACCCAG | |
| | GTCTCCCATCCCACTCCCTCGCCCTCTCACCCCCTCCCGCTGGTCA | |
| | GTGTTCTTTGTCCTCTGCTGGCATCCCTGGGGACGGGCCAGCCCCC | |
| | ATCCCCCCGACACACACACATTGTCCCTTCAAGATGGAGCCAGGCT | |
| | GACACCACGTAGAATGACCTGGAAGCCCCCACTCAGTCTACCAGTC | |
| | CTCCCTCCTCACACAGGAATAGATGGGAGGGAAATGAAATAAGCTG | |
| | CCATCTGCTGTGCATCCTCTGTGTGCCATGCTCTGGGTACCCATCT | |
| | AATCCTCGTGAAGACCCTGAGAAGTGAGTGTTCTTCACAGACTAGG | |
| | CAACACCAGAAGGCAG[G/A]TGAAGAACGTACAGAAGCTACAGAG | |
| | TGCACAGGTGACAGGTATGAGAGCCAAGCCATTCAAACTCCCTGGG | |
| | TATAGGACCCAGCTCTTCCCACGTCTCTGCCTTTACCGAATCAAAC | |
| | ACCTGAGCACGGAAGACCCTCCATCAACATGAACTGCTTTGAATTG | |
| | ACATGAACAAGCTTCAATCAAACTATAAATGCTGAAATTTTTCAAT | |
| | TATAGAAAGTATTTGAAAGATCCCATAAATTCCCCTGTCATATCAC | |
| | GTGAGCTGCATTTACTGCAGCAGACACTTTTTATCTCCGGCTTGGA | |
| | GGAAGGATTAGCAAGAAGAAAGTGGAGGGGGTCTGAGGAAGGGCTG | |
| | GCAGCCTAGAGGAGGACAGCAGCAAGAAGCAGGCTGGAGGCAGTTC | |
| | TGTGCTGCCGGCCTTCATGGGTGTGGCCTTTGGACAGCACCTTAGC | |
| | AGGAATGTGGTGGAGAGCAGCCCCATTCACTCCAGAGGAGAGC | |
| KCP_1993 | AAGACCCTGAGAAGTGAGTGTTCTTCACAGACTAGGCAACACCAGA | SEQ ID NO. 212 |
| 65 | AGGCAGGTGAAGAACGTACAGAAGCTACAGAGTGCACAGGTGACAG | |
| | GTATGAGAGCCAAGCCATTCAAACTCCCTGGGTATAGGACCCAGCT | |
| | CTTCCCACGTCTCTGCCTTTACCGAATCAAACACCTGAGCACGGAA | |
| | GACCCTCCATCAACATGAACTGCTTTGAATTGACATGAACAAGCTT | |
| | CAATCAAACTATAAATGCTGAAATTTTTCAATTATAGAAAGTATTT | |
| | GAAAGATCCCATAAATTCCCCTGTCATATCACGTGAGCTGCATTTA | |
| | CTGCAGCAGACACTTTTTATCTCGGGCTTGGAGGAAGGATTAGCAA | |
| | GAAGAAAGTGGAGGGGGTCTGAGGAAGGGCTGGCAGCCTAGAGGAG | |
| | GACAGCAGCAAGAAGCAGGCTGGAGGCAGTTCTGTGCTGCCGGCCT | |
| | TCATGGGTGTGGCCTTTGGACAGC[A/G]CCTTAGCAGGAATGTGG | |
| | TGGAGAGCAGCCCCATTCACTCCAGAGGAGAGCCTCAAACTCTTCA | |
| | GGCAGATCTAGCCTAGGTAGAATCTTGGCCTGGCCCCTCCGGGATG | |
| | ACAGGTGCCATTGCCCAAGAATGGGGAAAAGGCTGAAGTGCTCCAG | |
| | CCAAAGACCCCAATTTATCTTCAGGACAATTTTCACTGGAAACCTT | |
| | GCCTCACCACTGCCCACTTTTTCAGAAGTAATTAGAATGCTAATCT | |
| | ATAAGAAAGATGACTATTAAAAATAAATTAATAGTAGATAATACAT | |
| | TTTGGCTTACAATTTTGAATAATATAGCCATCCCATCTTAAAGTAA | |
| | AAATTCATATATTTTTAATAAGCCTGAGACATGTTTTCCAATGAAC | |
| | CACAGATGGTTCATTTTTATTATCCTATAAAGAGACATTATGGGCA | |
| | AGTGTTTTTTAAAATGGTAAAACAGAACCTTAGAGCAGCTCTCTTT | |
| | T | |
| KCP_2002 | GGCAAGTGTTTTTTAAAATGGTAAAACAGAACCTTAGAGCAGCTCT | SEQ ID NO. 213 |
| 41 | CTTTTGAAGATCTCTAAGCACTTTCTAAGCATCAGGACCCCCTTCT | |
| | GTCATCACAGAGACTGAAATGAGGAGATGGTCTCTGTCACCCCCTC | |
| | ACTCACCAGTGAGCCCCAGACCTTCATCCCTGATCAGATGGAAGCA | |
| | GTGTGGCATGATTACAGTTCATATTTCAACTCTGCCACTCAATGAC | |
| | TAATAGCCAAGCACTAATAATGCAGAAAATGTAAATTTAAAAAATA | |
| | ATCTTCCTGAGATTGGTTATGAAATGCACTCAACACAGCACCATCC | |
| | ACAGAGAGGTTCTTTTTAATTGCTCTTTTCTTTCCTCTCGACACCC | |
| | AGAATCACAAAGCATGCCTGAAAGCGTCACACATATATGTCTGTGA | |
| | CCATAACATGGCATTGCACATGCAAAGGAAATAA[A/G]TAGGTGT | |
| | TACCCATGTGACAAAGGTCCATGAGCTCTGTCCGCAAAAAGCTGTT | |
| | GAGTTTAAAGAACAAATAATTCTGAAAAATCTTCCAGGAGATGAAA | |
| | TTTGTAGAACTCAAGGGCAGTAAACTAGCTGCTTTCCAAGGACTTG | |
| | TCATAGCTTTATTGACTTACAATAGCCAAAGATAAGTCAGTATTAA | |
| | TCAAACCCATTCTCTAGAAAAACCTCATCATCACTGGGGCCAGGGC | |
| | AGAGAAGTGTGACACAGCTCTCTCCAGCTTCCCCACTTCACAGCAT | |
| | GGTTCCACCATCCACCCAATTGCTAAAGCCTGGATAGTCTTCCTTG | |
| | TCACCTCCCGATCCCCTTCTCTAACACCCATCCCCCGGCCACCCAA | |
| | CATCAGCAAGTCTGGTGGTTTCTCTCTGTCACAGAGATTCAAGATC | |
| | TTCCC | |
| KCP_2019 | TCGTAGTGTTCATAGACTCTCCTTCCTTCCTAACTTAAAAGAGGCT | SEQ ID NO. 214 |
| 85 | CCTTCTGGTTTTTCCTTCATACACTTCCCTCACTCTTTTCCTTCAC | |
| | TGCACTAAAGATGATTTCTAATTGCATAGTCATTGATGCCAGTATT | |
| | TGTTTATTGTGTCATTCCTGCTGAACAGAGGATGGGCCTGACTTAT | |
| | TTGGGACCATGTTGCTGATGCCTGGACCTAAGCCTGGCACAGAGTA | |
| | GGAGCTCAACAAATTTGTTAAATGAGTGGCTGAATGGCCATACTCT | |
| | CAAAGGACCCACAGTCTAGGAGAGACAGAAGAATCTTTGTCTTTTT | |
| | GTCTTGCAGTGGGATGGAAGCTGCAGGGAGGGGTCTTGTCACATTG | |
| | ATACTGTCTGGGGAAGACAGAAAAACTTCAGTTTCAGAGGAGGTAG | |
| | CCCTTGAAAC[G/A]AGATTTGAGAGAGGGCAGCACATTGTACAAC | |
| | TCCATGGGCACCATGCACATTGTAGTCCAGATAAACAGAGCCCCTT | |
| | GGAGATATGTGAGGCATGGGATAGACTCAGAGAAACCCAGGAAATA | |
| | ACCCCTTCAGGCATCTGACATGCAAAGATGTGGAAGTGTCAACCAG | |
| | GAAGTCATGTTGGGGGAACAGCAAGTATTTACAGAAAGTGACTGTG | |
| | TGTGTCTGTGTAGGAGGGTGACTTTGTATAGGAGAGATAAAACCTG | |
| | TGAGCTAATCAAGGAGAAGATCATAAAAGACCTTCATAAAGAGCAT | |
| | GGCCTTTTTCCTGCAAGCAGTGAGGAGCCATTGAAGGCTTTAGCAT | |
| | AAGGACAGTCAGATGTACTTCCCTAGAATGCACATTTCCTTCTGCT | |
| | CCAGAACTTCTGCACAGGAGGCTCCTAAAAGCTCTCCCCATCCTCC | |
| | CTGTACACGTAGAATCTGCCTCTGTCTCTCTTTCTCTCT | |
| KCP_2020 | CACTTCCCTCACTCTTTTCCTTCACTGCACTAAAGATGATTTCTAA | SEQ ID NO. 215 |
| 67 | TTGCATAGTCATTGATGCCAGTATTTGTTTATTGTGTCATTCCTGC | |
| | TGAACAGAGGATGGGCCTGACTTATTTGGGACCATGTTGCTGATGC | |
| | CTGGACCTAAGCCTGGCACAGAGTAGGAGCTCAACAAATTTGTTAA | |
| | ATGAGTGGCTGAATGGCCATACTCTCAAAGGACCCACAGTCTAGGA | |
| | GAGACAGAAGAATCTTTGTCTTTTTGTCTTGCAGTGGGATGGAAGC | |
| | TGCAGGGAGGGGTCTTGTCACATTGATACTGTCTGGGGAAGACAGA | |
| | AAAACTTCAGTTTCAGAGGAGGTAGCCCTTGAAACGAGATTTGAGA | |
| | GAGGGCAGCACATTGTACAACTCCATGGGCACCATGCACATTGTAG | |
| | TCCAGATAAACAGAGCCCCTTGGAG[A/G]TATGTGAGGCATGGGA | |
| | TAGACTCAGAGAAACCCAGGAAATAACCCCTTCAGGCATCTGACAT | |
| | GCAAAGATGTGGAAGTGTCAACCAGGAAGTCATGTTGGGGGAACAG | |
| | CAAGTATTTACAGAAAGTGACTGTGTGTGTCTGTGTAGGAGGGTGA | |
| | CTTTGTATAGGAGAGATAAAACCTGTGAGCTAATCAAGGAGAAGAT | |
| | CATAAAAGACCTTCATAAAGAGCATGGCCTTTTTCCTGCAAGCAGT | |
| | GAGGAGCCATTGAAGGCTTTAGCATAAGGACAGTCAGATGTACTTC | |
| | CCTAGAATGCACATTTCCTTCTGCTCCAGAACTTCTGCACAGGAGG | |
| | CTCCTAAAAGCTCTCCCCATCCTCCCTGTACACGTAGAATCTGCCT | |
| | CTGTCTCTCTTTCTCTCTCCTCCTCCTCCTCCATCTCCTCCTCCTC | |
| | CTCCTC | |
| KCP_202 | GCTCCAGAACTTCTGCACAGGAGGCTCCTAAAAGCTCTCCCCATCC | SEQ ID NO. 216 |
| 795 | TCCCTGTACACGTAGAATCTGCCTCTGTCTCTCTTTCTCTCTCCTC | |
| | CTCCTCCTCCATCTCCTCCTCCTCCTCCTCTCCCTCTCTCTCGCTG | |
| | TCTCACACACACATACACACACACTCCTTCCTTCCTATCTAGTCAG | |
| | ATTCCACTCCTTGGGATTTCAGGCCCACCGTCACTCCTCAGGGAAG | |
| | CCTGCCCTGAATGCCTGCACTACACCAGGGCCCCTTTCCCCTGCCC | |
| | CCATCCCAGAGCACCAAATAGCTTTCCCTTGCAGCACTTCTCACAG | |
| | CTGTCATTTTATGTTTGTGTCTGTGATTCTTAGGTTAAGTCCCTCA | |
| | TGCACCAAATCATAAGATCTGGGAACAAGGACCACACCTGTCCTG | |
| | [C/T]TCATCACTGTAATCATCACACTGCCTGCCAAAGTGCCTTGCA | |
| | CATATTAGATACTTAGTAGTTATGTGTTCCATGAATGACTCTTTAA | |
| | GAGATCTTCTAGCTGTTCTTGCAAAGAACCCATTGGTAAGGTTGAA | |
| | CCTACAGGCTGATACTTTGCACTAGTCTCAGGAAGAGATGGTGAGT | |
| | ACATGAAATTGAGTCCCCCAGAGGTTAATGCCCAGTGCCCCAGCTA | |
| | GGAAACGTCCAAGGAGGCAATTTGAACCCCATCTGTCTGGCTGCAG | |
| | AGCCTAGCCCTCTAATGCATTCAGGGGTCCTAGCTCCTCGAGGATG | |
| | CCACTGTGCCGTGAACTTCTTTCTGACCCTCATGGCTCCCAGCACA | |
| | GCATCCACACTCAGAAGTGCAAGATGAATGTTTGCAGATAATGAAC | |
| | ATAAAGCTCTCAGGAACCCTCATCTCCTGAGAATCTGCTTTGGCCC | |
| | CCACAGCAGGTCTGGGTGTGGACCTTCCCCA | |
| KCP_2042 | GTGGCAAAGTTGGGATCTTAACCCAGTTCTATGTGGCTATAAAGTT | SEQ ID NO. 217 |
| 42 | CATGGAATAGAATGCTGCAGTTAAGAACATGGGCTTTGGCATCAAG | |
| | CAGACCTGTATTTGAGCCCCACCTCTGCTGTTTATTAACTGTGGCC | |
| | CTGGGCAGATGACCTTACATCCTTAAGTCTCTAGTTCTTTGTCTTT | |
| | AAAAGGGTGGCAGAATGTACCTCACTGGTTTTAGGAAGGTCACATG | |
| | AGATAGTGCACATGAAGCCCTAGGCATGGGAAAATTCTTCTAAAAT | |
| | GTCAGCTGCCATTCTGATCACTGCAAGACCCCCACCCCCAATACTC | |
| | CCAATTGTACCACCCCACCCCACTCACCAGTGTCTCAGAAATGCCT | |
| | CCTCCAGAAGGAAGGCATCCTGTCTAACCCACTGCTTCTAGCCAAG | |
| | CTGTCTTTCTTCAGAAGGTAGAAAAAGATTGTTAGTCATTGTTTAA | |
| | TCTTTATTGAGTATATACCGCCACACCAATTGCACTGCCA[C/T]T | |
| | CATTATCTCATTTAAATCTGACAAGAGCCTTGTAAAGTAGGGATTA | |
| | TTCCCACCATTTCCCAGATGTTGAAACTGAAATTGATAAACACGAC | |
| | ATGTTGCCATGGCTACATGAAGATCTCCAAGCCGGAGGATCTCCAC | |
| | CCTCACCTGCCTAGCTTCCCAGACCTCTCTGCAGAAAAGGGACTGA | |
| | CCCCCAAGACAGCCCTGGCCTCTGGGCTCCACCCCTTCCACATCCA | |
| | TCCCAGGGCCGCTGAGGACTGAAGAGTTCTCCACGTTTGCCCTTTA | |
| | AAGTGACTTAAAAATAATCTTTATGAATTTCTTCATATACAAAATT | |
| | TGTACTTACTCATTGCAGCAAATTTAGAAAATACACATAAGCAAAA | |
| | AAGAACGTAACAGCCATCCATAACCCTAACTCTCAGAGATCACCAC | |
| | TATTAAAATGTTTATTATCTAAGAGAGAGATGATATAGACAAAGAT | |
| | GAGACAGATTGACACAGAGAAGATGGGTACATGATAGAT | |
| KCP_2062 | TGCTCAACTGTAATCAAACATTATTTTTAAAAAATCATTCCAGCCT | SEQ ID NO. 218 |
| 67 | GGGAAACAGTGAGAAACCCATCTCTACAAAATAAAAAATAAAAATT | |
| | AGCTTGGCATTGTGGCATCTGCCCGTGGTCCCTGCTACTCAGGAGG | |
| | CTGAGATGAAAGGATCACTTGAGCCTGGGAGGTTGGGGCTGTGGTA | |
| | AGCCGTGATTGCCCCATTGCACTCCATTCTAGGCAACAGAGTGAGA | |
| | CCCTGTCTCAAAAAAAATATTATTCATTTAATATCTGTTGCCACCA | |
| | CAGGACTGATCCCTCTGTGAGGGCAGAGATTGTTCATGCATGGAAT | |
| | TGTGATTTATAAGCACTGGCTCTGGAGCCAGGTTGCCTGAGCACGG | |
| | AGCCAGCTGTGCCCTGCGGGACACCTGTGGCACACTTCACTCCTGG | |
| | GACACCTGGGACACGCACACAATAGAAATGTTCACATTTTACTAGG | |
| | CAATGCCAGTCACATAGTCCTACCTAATTTCAAAAGGGTA[A/G]A | |
| | AGGTACACCCAACACGCATCAGGAACCAGGAGGACCAGAAATTGTT | |
| | GGTGACAAGCACAAATGACCACCCCAATATAATATTTTGTTTGGAA | |
| | GGCATTTTATTCCACAAAAACAACATTACAATAAACACAACAACAA | |
| | AACACTGGTTGCAGTAGAACCAACTTTCCAGACCTATCTGCACAGC | |
| | ACAACCATTATCCCACTCAAAATGTCATGTTTTTACCCAAAACATT | |
| | AAAATTTTAAAAGCAATTCAAACCCATAGCTTAAAAAATGTTCCAA | |
| | CCAGTAATAAAAGGAAAAGTGTGCCTCCTCCTCCCAACTTCCCTAC | |
| | CCCACAATCGCAAGATATTATCCTTATAGGCGAAAAGGGTTTCAGG | |
| | ATTTGAGATGCAGGCTGGGAGGTCTGAGAAGACTTCCTATAGAAGA | |
| | CATGACTTCAAACTCTTTCTTGTATGTGAGATTTAATTTTCAAAGA | |
| | CTCCTCTGATCCAACTTAAGCTTTATGGTAAATCACCTT | |
| KCP_2076 | ATATGCCAGCGCTCTATCTGCAGGGGTTCTTTTGATAGCAGCAGAC | SEQ ID NO. 219 |
| 61 | TGAGAGATGATGTTACTGTCCCCTTTTTCCTGTTGTTGGCAACTGA | |
| | GACTCAGAGGATGGAAGTGACTTGCTCAGGTCCACCACCTCTTCAG | |
| | CTGTGGAGCTGCGACAGGAGCCTTTGTTTGACTTCAAAGCTCACCA | |
| | TCACTCCTCTCTCACTGATGCTCAAGTGGGCTATCACCTCGCCTTT | |
| | CCTGAGCCTTCCTTCGCTATCCTAAAACAGCGCCTCCCGAAATCAC | |
| | CACTAAAGAACTTATTCATGTAACCAAACACCAGCGGTTCCCCTAA | |
| | AAACCTATGGAAATAAAAATTAAAAATAAAAACAGTGCCTCCCATG | |
| | ACCCATGTCTCTCCAGTCCCATAACTCTGCTCTATTTCCATTCACA | |
| | GCTCCATCCCCACCTTTATGTCTTTTGTTCACTGCTTTATCCCCAG | |
| | TGCCTAGAAGAGTGCTTGGCACCTAGTAGACACTCAGTAA[C/G]T | |
| | ATTTGTCGAATGAGTTAATAAGGTTGTGAAAAGAACGTTAGATTAC | |
| | TGGAAGGATTCATCTGAGTTTAATTCTGCTATGCTGGGAATCCAGT | |
| | GTGCGGCCTTGGATGAAGCCAGTTCCCTCCCTGGGCCCCAGTAGCC | |
| | ACATCTGTACATTTAGAGGGCAGGAGAAAAGCCACACGCTCTGTGA | |
| | CTTATACAACTTGTTGCCCAGAGTGGAGGCTGCTTTGATGCTCAGA | |
| | AAAAAGAAACAAACATGGAAATGCTAAATGGGTGGCAGAGAGCTTG | |
| | AGGGAGGAAGGAGATGGGGAGGGTACTCTTGAAACTGTTTGGTGTC | |
| | TTCCCTCCTGCCCCCTCAGTACCAATTGTCAAGTACAGAAAGTGAA | |
| | GGAGACTTGTATTAGTGGAATTTGGTCCCTGACTTGTTATAGAGAC | |
| | ACAATTACAAAGACACAAGAGTGGGCCCAGCAGAGACCCTTAGGGT | |
| | GGTCCCTTGAGGTTCCAAAGCATCTGCCCATCAAGCAGA | |
| KCP_2079 | CACCAGCGGTTCCCCTAAAAACCTATGGAAATAAAAATTAAAAATA | SEQ ID NO. 220 |
| 65 | AAAACAGTGCCTCCCATGACCCATGTCTCTCCAGTCCCATAACTCT | |
| | GCTCTATTTCCATTCACAGCTCCATCCCCACCTTTATGTCTTTTGT | |
| | TCACTGCTTTATCCCCAGTGCCTAGAAGAGTGCTTGGCACCTAGTA | |
| | GACACTCAGTAAGTATTTGTCGAATGAGTTAATAAGGTTGTGAAAA | |
| | GAACGTTAGATTACTGGAAGGATTCATCTGAGTTTAATTCTGCTAT | |
| | GCTGGGAATCCAGTGTGCGGCCTTCGATGAAGCCAGTTCCCTCCCT | |
| | GGGCCCCAGTAGCCACATCTGTACATTTAGAGGGCAGGAGAAAAGC | |
| | CACACGCTCTGTGACTTATACAACTTGTTGCCCAGAGTGGAGGCTG | |
| | CTTTGATGCTCAGAAAAAAGAAACAAACATGGAAATGCTAAATGGG | |
| | TGGCAGAGAGCTTGAGGGAGGAAGGAGATGGGGAGGGTAC[C/T]C | |
| | TTGAAACTGTTTGGTGTCTTCCCTCCTGCCCCCTCAGTACCAATTG | |
| | TCAAGTACAGAAAGTGAAGGAGACTTGTATTAGTGGAATTTGGTCC | |
| | CTGACTTGTTATAGAGACACAATTACAAAGACACAAGAGTGGGCCC | |
| | AGCAGAGACCCTTAGGGTGGTCCCTTGAGGTTCCAAAGCATCTGCC | |
| | CATCAAGCAGATGATGTGATTAGTCTCTGTGACCCCAAGGATGCCT | |
| | CCTGAAATTGCTGATTCAATTTCTCCTAATAAAATAGGAACAATAA | |
| | TTAGCTAATAAGAAATCAACAATTAAAGCTATGAGAGAATTAAGTG | |
| | AGATCATGTAAGCAAAGTACATGTCACAGTGCTCTGCAAATAGGCA | |
| | GTGCTCAGAAGTGTCACCTTTTCTCTTTCTTCTCTGAGCCTCCGTC | |
| | TTCTCTTCGGTAAAATGAGAATAATATTATGCATACCTCACAGGGG | |
| | TTAAGCAATGTGAAAGTACTCTGTAAAGTATAAGGCTGA | |
| KCP_2115 | GAGATGATCAACAGTCTTTCATCCAGAGGGTTGTGTTTGCTGGTGG | SEQ ID NO. 221 |
| 25 | CCATTACCTTTAACATAAAACGATCATATTTACTTTATCCTATTCA | |
| | TGTCCAACCTCAACTGACAATTGAGTTGTGTCTCTGACAATAAATA | |
| | GCAGAAAAAGGAAATCTTCCTATACTGAAGAGAAACACAATTAATT | |
| | AACTAGATCCATCAGGAAAGGTACAATCATGATTGAGACAGTGTTT | |
| | AACAGATGTGACTATTGGATTCTGTTGTTGAGAATGACCCTTAAAA | |
| | TCACAGTCAAAATATACGACAAGATGGAAATAACATTTTTGAGCAC | |
| | CTACTATGCATGTAGAGCATCTTACATACCTTATCTCACTTAGATT | |
| | TACAGCTGCAAGGTGGGTATGATTCTAGCTTGAATTAGTCTAATAA | |
| | CCATATACCTCCTAGGGGCAGTGAGATGATTAGATCAATTCTAAAA | |
| | CTATTACCATGCTCTCTGAGCTCACCAAGACAGGCAGTTA[A/G]T | |
| | ACAAGGATACATTAATACCGAATCCAGCAAAAGCTCACATGGCCAG | |
| | CTTCCATTATGTTCCTATTTGTGATTATTCTGTATCAAGCACAGAA | |
| | ATGTATGTTCACACGAACAACAAAGAAGGGGTTTATTAGTGTGGAT | |
| | TACAGGGCCTAAGCCTACCCTCTGAAACTGGTTTTGGAGTCTTTAG | |
| | CACGCTTGTTTGGGACAGTTALACATGTGCCAGCTATTCTAAAACA | |
| | GTAGCAGTAATGTGATAGAGCTGGGTCATACCGTGCTTCCCAAAGT | |
| | ATGATCACTTCATTTCAACAACTTCACACTAACAGCCTGAACTGGG | |
| | CTGTGAAGGGAATATTTAGACCAAGGAAACTGGAAAACTGTATCAA | |
| | TCAGGCTTTTCCACCCTCCCCAAGAGCCAGTTGTCAGATATCTACC | |
| | AGCCTACCAACGCTAGCTCTCTAATCAGAAACCATCACTTAGCAAG | |
| | TTCCCAAATTATCTGCAGAGCAATGAACTCCTCTTCTTC | |
| KCP_2118 | CTATGCATGTAGAGCATCTTACATACCTTATCTCACTTAGATTTAC | SEQ ID NO. 222 |
| 50 | AGCTGCAAGGTGGGTATGATTCTAGCTTGAATTAGTCTAATAACCA | |
| | TATACCTCCTAGGGGCAGTGAGATGATTAGATCAATTCTAAAACTA | |
| | TTACCATGCTCTCTGAGCTCACCAAGACAGGCAGTTAATACAAGGA | |
| | TACATTAATACCGAATCCAGCAAAAGCTCACATGGCCAGCTTCCAT | |
| | TATGTTCCTATTTGTGATTATTCTGTATCAAGCACAGAAATGTATG | |
| | TTCACACGAACAACAAAGAAGGGGTTTATTAGTGTGGATTACAGGG | |
| | CCTAAGCCTACCCTCTGAAACTGGTTTTCGAGTCTTTAGCACGCTT | |
| | GTTTGGGACAGTTAAACATGTGCCAGCTATTCTAAAACAGTAGCAG | |
| | TAATGTGATAGAGCTGGGTCATACCGTGCTTCCCAAAGTATGATCA | |
| | CTTCATTTCAACAACTTCACACTAACAGCCTGAACTGGGC[C/T]G | |
| | TGAAGGGAATATTTAGACCAAGGAAACTGGAAAACTGTATCAATCA | |
| | GGCTTTTCCACCCTCCCCAAGAGCCAGTTGTCAGATATCTACCAGC | |
| | CTACCAACGCTAGCTCTCTAATCAGAAACCATCACTTAGCAAGTTC | |
| | CCAAATTATCTGCAGAGCAATGAACTCCTCTTCTTCAGAAAGCAGG | |
| | CTGAAAGATACACTGTTCACATCTTAGCCTGACCTGGACCCAGTGA | |
| | GTTTCCATCAGTGAGAAAATTCTGTGCTAACTTGAGATAATACTAT | |
| | TCTTGTGGCAATTTTACTTTTCCTTTGAGCGATTCCTTCAACCTCT | |
| | CTCTGCCCCTTCATTTTTCCGTCTTAAAACTAAAAGTGCCCTTTCT | |
| | CCCTGGACACTCCTCATTTGCAATGAATTGTCATTTCAGCTCCTCA | |
| | GTCAAGAGGAGTAATGAAATCCCACCCGTGTTAATCCTCTTATATC | |
| | CCGCAGAAATATTGTAGACCCACTCACCCTAGGCAACAT | |
| KCP_2127 | AGTAATGAAATCCCACCCGTGTTAATCCTCTTATATCCCGCAGAAA | SEQ ID NO. 223 |
| 75 | TATTGTAGACCCACTCACCCTAGGCAACATGCCCTCTCTCTTCAAC | |
| | ACAGGTCATCAATTGTTCATTTACTGGCTATCTCCATGTACTGGAA | |
| | CTTCAGGGTGGTGTCCAGCTGGGTTCAAAGGAGAAACAGTGGGAAG | |
| | TTTCTCCACTGCCACCTCAATTAGATGAGAAAGAGTTGTCTACTGA | |
| | AATACACTAGCTGGTGGCAGGATTGGGACGTCATTTGACTAATTGC | |
| | CTCCTAGAGCTGCAGAGACTGCTGGAACTACCTAAGTAAATCATCA | |
| | AAAAAAAAAAAAAAAAAAATCATCCCAGGGCACTTTTTCCAGACAA | |
| | AAAGGTCCACTTAAAACATCCTCTAGAGATCTGTGCCTGAAGCTGA | |
| | GCTGCTGCAATGAAACTGACATTTCTGCCTTGCAGCCTGGCCATGG | |
| | GCTTAGCTGGACTAAAATGCTGCTGCAGTGGTGAGGGCAC[A/G]T | |
| | GAGAGTCCCTAATGTACATGGCCTTGCTCCTTGTCCTGACACATCT | |
| | TTTAGGGCTGCTGCTTTCTCTAGTGCTGGAATCTAGATAATTCCTT | |
| | TCCCAGCCGTTTGTTTCTTCAATCTTGGAAAATATCTGGATGAATG | |
| | TAACACTGTCACACACAAACAGAATTATGACTTACGTCACATTCTA | |
| | TGTCGTGATTTTGTGGACTTTTAATAATTGCATTACATTTGTGACC | |
| | ATTAATTTCCACCATCGCCCTGCTCCTGAGAATCTGTAAGGGACAT | |
| | TTGACACTCCTCTCCCCACCCACCTCAACATTTGTGCTGACCTGAA | |
| | GGTCACATTAAAAACATACCCATTTGGAGAGAAAGATCTGTCTACT | |
| | GAAATACACTAAATATTGAAGAATTTCCAAGTCATTTGATCTTGAA | |
| | AACTCCATCTAATGGAAGCAGAAACACTCAAAGGTTTTTTTTTTTG | |
| | GACTCCCTTTTTCAGGACACTTTCAGGACTGAGGTATAT | |
| KCP_2217 | TCAGACTTTGAACAAACCTCAGAAGGAACTGTCAAGGAGGCTCCCC | SEQ ID NO. 224 |
| 99 | ACGGGTTCACGCTCTTCTCTCCTCCTGCACACAGGGAACAGGGCCA | |
| | TTCTCCTTCCTTTACTGGGACTACCTGGGCTTCATCCAGGGAATCC | |
| | CCAGGTGGCAACAGGAGGGTGGTGAAAACCGCTGCCCGTCACCTGT | |
| | AAAGTTTCCTGTGAATGTGTCTACAGCGGCCAGCACCACAAGGCAT | |
| | ACAAAGAAAGGGAAGGGAGAGCTGATGTGAGAGCGGCAGCGTGGGC | |
| | ACTCCTGTGAGGTTGCCACAGCTGTAGACAAGTTAAATCAGTGCAG | |
| | TTCAATCAAAAGTCATGACCCATGAGCGTCACAACCAGCACGAGTC | |
| | TACAAAGGAATACATTAAAACTAAGACCAGAGCACAGCTCACATTA | |
| | GTGAGGGATGGGATCATTTCATGGAGTTTTTGTTTCAAAATATTTC | |
| | ATTAACATTTCACTTATATACATGTGTGTATACTGGGTTGTGAT[A/ | |
| | T]TAAATTACAATTCTTACTATAAAATACAGCALAAGAAAGAAGA | |
| | AACAAAGAGAGGGCCACTGGTTTACCTAACATCCACAGGCAGGCTA | |
| | CTTCCCAGCATCTTGAGCCCCAAAGAAGTAAATTTCCTTCCACAAC | |
| | CGATGTTACCACAGCCTGACACTTAGCCAATGATGAAAACGAAAAA | |
| | CAAAACAAAAGCTTGGCAGTCAGTATCCAAATATGCAGATACTACA | |
| | GAATCTGTTTGATGTAGAAGTTGATCCTGCTACCCAGACAGCAAAC | |
| | AACTCATTTATTAATAAAGTCCAGTTCCTCCTTAATGAAGTGGGTT | |
| | TAATAGTTGATATCTCAATAATTACTTAGTGCATTTTTTATGAAGG | |
| | TGATGGGAAACAAGTGCTGTTTCTTGAGTCGGAAAGAGTCTCTCAA | |
| | GCTCCCACAAAGAAATTTCCCGAGCTTGTGAGGAATTCAGTCACAG | |
| | GAAGATCAAGGAATT | |
| KCP_2235 | GATCTAATGCTAGGAGATTCAAACCAACAATTAATTTCTCTGTTAA | SEQ ID NO. 225 |
| 68 | AATGGGTTAAAATAGATGTAAAATATTAATATGTATATAAGCATTC | |
| | TGAATTAGACTTATGTGAATTTTTCTCCTTTTCTTTCTTTCTTTTT | |
| | GAGAATAAGCCCTTTCATTTACGTAGAAATGCTTCAGCGTTTAGAT | |
| | AATTGCTACTTATCTTGTTAGCTACAAACACAACCATAATTAAAGG | |
| | CTCTGTAAGAATTATGAATTCTGGGGAAATTGGCCACTTGTCTCTG | |
| | TGGCGTAAACAGTATCTAATTTATAACAAATCATCTGCCTTAGTCC | |
| | CAGCAGGATAAGGTGATATGTATTGCCCAGCACATGAGAAAGATGG | |
| | CAATTAGGAATTGTTACCAAGTTACGGGAGCCTCACACGAACATCC | |
| | ATCACCTTTGGGGATATGTACAAGATACAAACTTAATTTGATGGAT | |
| | TCCTTTTGTATTCGGATCAAAGTCTCAAAAGGGAAAGTGACAATTT | |
| | CAGGGAAAATCTGGTGCAATGAGACCAACACTGATGAGAGAAATGC | |
| | ACACAATTTAATACACCTGCTCACCTGATGTGGCAACTCAGCCTGT | |
| | GCTTGCTGTGGGTTGCCACAGGATGAGACATGGTCTGTGCATATTC | |
| | CCAGCAGCCACCCATCTCATCACTATTCTTGCCAGCCCAGATTTAC | |
| | AGTTGTTCAATAGATGGATTTGGTAATATCTGCATGACAACAACAG | |
| | GCAGAGAAGGTTAGATGGCAATTGATTCTTGATTGGTGTAAGTTTA | |
| | TAGAACACATTCTGGCAGGGCCCAAAGGAAATCACTCACCTACCCC | |
| | TCTGTGATGGTAAAACGTTGAAAATTCCACGGACTTGGACCTTGTG | |
| | ATCCTTCAGTGGAAGATGGGCAGATTCCTTGCTTTAATTGACAGAC | |
| | ACTTTCTAAATAACTAATGCAATCTTATATTACATTATAGTCCATA | |
| | AGGGAGACATACTTAAACTACTACTTACAACAAC[G/T]GTTTTTA | |
| | GAGCCTTTCAAATGGTTTGTACAAAGTAGCTCCCATTTAAGATATT | |
| | TTCCTAGTATTTAAGGCTATCTAGTAGACATTACAAAACAATACGC | |
| | TGTAAATACATTCAGATTTTTATCAGTAATACTTAACATGCCGTAA | |
| | TTTGAACTTTCTGCTAAATCATGCTATCCATTCCTAGTTGGCCCCA | |
| | ATGGTGAGAGTTTACTGTTTCTTTAAATAATTTTGTTTCCCTTTGC | |
| | TGTCTAGAGGTGTTTATCATTCTGCTTACTTGCCTGTGTCTCTGGA | |
| | ATATTCAGAAGGTTCCATGGGAAACAATTTGAATATGCAAAGAAGT | |
| | TATTTTTAAAGCAAGGAAAATGTTTTCATATGGATTTATTTTGAGC | |
| | ACTTCTGCCTTTGCCTCCACTGGGAACATGTTTCTCTCCAACGCCG | |
| | AAGCCCCCTCCCTGTGTGGTGTTTGACGCAGAGGCTGACAGGGCAG | |
| | GGAAGTGGGGTTCAAGATAGGAAGGCCATTGGCAGTGTGACCCCAG | |
| | CCCACAGTCCTAGATCCCAGGTCGTGACACCACTCTTTTGACAGCC | |
| | CAGATTGTTACCTAACAAGAATGACTCCCAAGCTCAACCATTCCAA | |
| | TGCCATCTCCTCTGGTTCCAGATAAGATTGAAGATGAGCTGGAGAT | |
| | GACCATGGTTTGCCATCGGCCCGAGGGACTGGAGCAGCTCGAGGCC | |
| | CAGACCAACTTCACCAAGAGGGAGCTGCAGGTCCTTTATCGAGGCT | |
| | TCAAAAATGTAAGACCCGTGCACGCTCTGAAGGCCTGGGGGGGGTT | |
| | CCCACGTGAGGCTACACTCTCCCCAATGCCAAGGGAGCTCATAAGG | |
| | CGTTTCCCATATGTGAGGCTGTACAAGGAAGGCCAGCTCTATAAAG | |
| | GGGGCATGAGAGGGAGATCACCTGGCTAGAAAGGAAGGCTCCAGGC | |
| | GAGGATGGAGCAACCTCAGGAGACAGTAAACGGCCAACTGCCCAGA | |
| | AATTTCACAGGGTGGCACATCCTCAAG | |
| KCP_1152 | GATTTTTATCAGTAATACTTAACATGCCGTAATTTGAACTTTCTGC | SEQ ID NO. 226 |
| | TAAATCATGCTATCCATTCCTAGTTGGCCCCAATGGTGAGAGTTTA | |
| | CTGTTTCTTTAAATAATTTTGTTTCCCTTTGCTGTCTAGAGGTGTT | |
| | TATCATTCTGCTTACTTGCCTGTGTCTCTGGAATATTCAGAAGGTT | |
| | CCATGGGAAACAATTTGAATATGCAAAGAAGTTATTTTTAAAGCAA | |
| | GGAAAATGTTTTCATATGGATTTATTTTGAGCACTTCTGCCTTTGC | |
| | CTCCACTGGGAACATGTTTCTCTCCAACGCCGAAGCCCCCTCCCTG | |
| | TGTGGTGTTTGACGCAGAGGCTGACAGGGCAGGGAAGTGGGGTTCA | |
| | AGATAGGAAGGCCATTGGCAGTGTGACCCCAGCCCACAGTCCTAGA | |
| | TCCCAGGTCGTGACACCACTCTTTTGACAGCCCAGATTGTTACCTA | |
| | ACAAGAATGACTCCCAAGCTCAACCATTCCAATGCCATCT[C/T]C | |
| | TCTGGTTCCAGATAAGATTGAAGATGAGCTGGAGATGACCATGGTT | |
| | TGCCATCGGCCCGAGGGACTGGAGCAGCTCGAGGCCCAGACCAACT | |
| | TCACCAAGAGGGAGCTGCAGGTCCTTTATCGAGGCTTCAAAAATGT | |
| | AAGACCCGTGCACGCTCTGAAGGCCTGGGGGGGGTTCCCACGTGAG | |
| | GCTACACTCTCCCCAATGCCAAGGGAGCTCATAAGGCGTTTCCCAT | |
| | ATGTGAGGCTGTACAAGGAAGGCCAGCTCTATAAAGGGGGCATGAG | |
| | AGGGAGATCACCTGGCTAGAAAGGAAGGCTCCAGGCGAGGATGGAG | |
| | CAACCTCAGGAGACAGTAAACGGCCAACTGCCCAGAAATTTCACAG | |
| | GGTGGCACATCCTCAAGGAATTCACCCTGGCCCAGGGTCAAGCCTT | |
| | AGCCCTTAACATAATCATACCTTCCAACCTGGTGGTGCCCCCACAA | |
| | TAATGGGATTTGGCCCTGCTGACTTATGCTAACCAGGCT | |
| KCP_1333 | GGCAGGGCCCAAAGGAAATCACTCACCTACCCCTCTGTGATGGTAA | SEQ ID NO. 227 |
| | AACGTTGAAAATTCCACGGACTTGGACCTTGTGATCCTTCAGTGGA | |
| | AGATGGGCAGATTCCTTGCTTTAATTGACAGACACTTTCTAAATAA | |
| | CTAATGCAATCTTATATTACATTATAGTCCATAAGGGAGACATACT | |
| | TAAACTACTACTTACAACAACTGTTTTTAGAGCCTTTCAAATGGTT | |
| | TGTACAAAGTAGCTCCCATTTAAGATATTTTCCTAGTATTTAAGGC | |
| | TATCTAGTAGACATTACAAAACAATACGCTGTAAATACATTCAGAT | |
| | TTTTATCAGTAATACTTAACATGCCGTAATTTGAACTTTCTGCTAA | |
| | ATCATGCTATCCATTCCTAGTTGGCCCCAATGGTGAGAGTTTACTG | |
| | TTTCTTTAAATAATTTTGTTTCCCTTTGCTGTCTAGAGGTGTTTAT | |
| | CATTCTGCTTACTTGCCTGTGTCTCTGGAATATTCAGAAGGTTCCA | |
| | TGGGAAACAATTTGAATATGCAAAGAAGTTATTTTTAAAGCAAGGA | |
| | AAATGTTTTCATATGGATTTATTTTGAGCACTTCTGCCTTTGCCTC | |
| | CACTGGGAACATGTTTCTCTCCAACGCCGAAGCCCCCTCCCTGTGT | |
| | GGTGTTTGACGCAGAGGCTGACAGGGCAGGGAAGTGGGGTTCAAGA | |
| | TAGGAAGGCCATTGGCAGTGTGACCCCAGCCCACAGTCCTAGATCC | |
| | CAGGTCGTGACACCACTCTTTTGACAGCCCAGATTGTTACCTAACA | |
| | AGAATGACTCCCAAGCTCAACCATTCCAATGCCATCTCCTCTGGTT | |
| | CCAGATAAGATTGAAGATGAGCTGGAGATGACCATGGTTTGCCATC | |
| | GGCCCGAGGGACTGGAGCAGCTCGAGGCCCAGACCAACTTCACCAA | |
| | GAGGGAGCTGCAGGTCCTTTATCGAGGCTTCAAAAATGTAAGACCC | |
| | GTGCACGCTCTGAAGGCCTGGGGGGGGTTCCCAC[A/G]TGAGGCT | |
| | ACACTCTCCCCAATGCCAAGGGAGCTCATAAGGCGTTTCCCATATG | |
| | TGAGGCTGTACAAGGAAGGCCAGCTCTATAAAGGGGGCATGAGAGG | |
| | GAGATCACCTGGCTAGAAAGGAAGGCTCCAGGCGAGGATGGAGCAA | |
| | CCTCAGGAGACAGTAAACGGCCAACTGCCCAGAAATTTCACAGGGT | |
| | GGCACATCCTCAAGGAATTCACCCTGGCCCAGGGTCAAGCCTTAGC | |
| | CCTTAACATAATCATACCTTCCAACCTGGTGGTGCCCCCACAATAA | |
| | TGGGATTTGGCCCTGCTGACTTATGCTAACCAGGCTCACCGAGACT | |
| | GATGTGTAAGCCGAATGTCGGTGTATTAATTTACCTTGGGAAATGG | |
| | AACTGACAGTGGAAACAGACACTCCTCTCCCTTCGCTGGGACCCGC | |
| | TCTCCTTGGAAGCCACATGGAAGCCAGGTTACAATCAAAAGTGGAG | |
| | TCAGAGGACGGGAGTTCCTTGTTTAGTTGTTACTTTAAATACATTA | |
| | ATGTGTTCCTGCAGTCTCAGGCCAGTTTGAGAGCTCTCAGATACAA | |
| | TCCTGGATATTAATTTATTTTTTAAGTTTAACTCTCAGAGTGCAAT | |
| | CTTATTCCCAAATCCTGGAGTGGTGTGGAGTGGGGTGGGCTACAGC | |
| | GACATGCACCTGGTCACCCTCCCTCCAGGTGCAGTCTGTAGGTAGA | |
| | GCTGAGCTGGGTCAGTTCCAAACTGACCACAGCCTCAATGTTCTCC | |
| | AAACTGCTGACCCACAGGGATTCCAGCCCCTCCTGGGAGTTATCTG | |
| | ACAGGTGCTGGGATGCCTCTTCCTTCCACACTAGCCTTGACTGCAC | |
| | ATGCCAAGTGCCCAGTTTCCTACCATTAQ~GCTTCTTTCCTTCGAT | |
| | GGCAGCATTAGCAGTGGGCAGCCGAGTTGGAGAAGGATCCTGTGGG | |
| | AAAGTTTTCCAGGCAGGCACTGGGCTCAGAGGGAACAGCATCCAGA | |
| | AAAGAGAAGAAATCTACACTGCTTGGC | |
| KCP_2252 | AATTTACCTTGGGAAATGGAACTGACAGTGGAAACAGACACTCCTC | SEQ ID NO. 228 |
| 20 | TCCCTTCGCTGGGACCCGCTCTCCTTGGAAGCCACATGGAAGCCAG | |
| | GTTACAATCAAAAGTGGAGTCAGAGGACGGGAGTTCCTTGTTTAGT | |
| | TGTTACTTTAAATACATTAATGTGTTCCTGCAGTCTCAGGCCAGTT | |
| | TGAGAGCTCTCAGATACAATCCTGGATATTAATTTATTTTTTAAGT | |
| | TTAACTCTCAGAGTGCAATCTTATTCCCAAATCCTGGAGTGGTGTG | |
| | GAGTGGGGTGGGCTACAGCGACATGCACCTGGTCACCCTCCCTCCA | |
| | GGTGCAGTCTGTAGGTAGAGCTGAGCTGGGTCAGTTCCAAACTGAC | |
| | CACAGCCTCAATGTTCTCCAAACTGCTGACCCACAGGGATTCCAGC | |
| | CCCTCCTGGGAGTTATCTGACAGGTGCTGGGATGCCTCTTCCTTCC | |
| | ACACTAGCCTTGACTGCACATGCCAAGTGCCCAGTTTCCT[A/G]C | |
| | CATTAGGGCTTCTTTCCTTCGATGGCAGCATTAGCAGTGGGCAGCC | |
| | GAGTTGGAGAAGGATCCTGTGGGAAAGTTTTCCAGGCAGGCACTGG | |
| | GCTCAGAGGGAACAGCATCCAGAAAAGAGAAGAAATCTACACTGCT | |
| | TGGCATCTACCATGGACTCAATACCACCTAACATAGGTTCATAAGA | |
| | TACCCTTGGGGAAGTTATTGTTACCCCCATTTTACAGGTAAGGATA | |
| | TTGAGGATCAGAGACTGGCTTGGCCAAAGTCACAAAGCTTACTATT | |
| | GGCTGAGCCAGGATTTAAACCCAGGTTTTTCTGATCTTAAAGCCCC | |
| | AAATCTCTCCACCTCACAGTGCCCATTCTCTGACAATGTCTCATCA | |
| | TTTTGCAAAGCAGCTCCAGTCCTGAGATGGCACTACTTGGGAGAAG | |
| | TGGAAATGCACAGGTCCCTGTCCCTGGGGATCATGAGGAACCCCAG | |
| | ACACCAAGGCTGGGCCCAGTCTTCTCCTAGTGCTGGCCC | |
| KCP_2649 | GGCTCACCGAGACTGATGTGTAAGCCGAATGTCGGTGTATTAATTT | SEQ ID NO. 229 |
| | ACCTTGGGAAATGGAACTGACAGTGGAAACAGACACTCCTCTCCCT | |
| | TCGCTGGGACCCGCTCTCCTTGGAAGCCACATGGAAGCCAGGTTAC | |
| | AATCAAAAGTGGAGTCAGAGGACGGGAGTTCCTTGTTTAGTTGTTA | |
| | CTTTAAATACATTAATGTGTTCCTGCAGTCTCAGGCCAGTTTGAGA | |
| | GCTCTCAGATACAATCCTGGATATTAATTTATTTTTTAAGTTTAAC | |
| | TCTCAGAGTGCAATCTTATTCCCAAATCCTGGAGTGGTGTGGAGTG | |
| | GGGTGGGCTACAGCGACATGCACCTGGTCACCCTCCCTCCAGGTGC | |
| | AGTCTGTAGGTAGAGCTGAGCTGGGTCAGTTCCAAACTGACCACAG | |
| | CCTCAATGTTCTCCAAACTGCTGACCCACAGGGATTCCAGCCCCTC | |
| | CTGGGAGTTATCTGACAGGTGCTGGGATGCCTCTTCCTTCCACACT | |
| | AGCCTTGACTGCACATGCCAAGTGCCCAGTTTCCTACCATTAGGGC | |
| | TTCTTTCCTTCGATGGCAGCATTAGCAGTGGGCAGCCGAGTTGGAG | |
| | AAGGATCCTGTGGGAAAGTTTTCCAGGCAGGCACTGGGCTCAGAGG | |
| | GAACAGCATCCAGAAAAGAGAAGAAATCTACACTGCTTGGCATCTA | |
| | CCATGGACTCAATACCACCTAACATAGGTTCATAAGATACCCTTGG | |
| | GGAAGTTATTGTTACCCCCATTTTACAGGTAAGGATATTGAGGATC | |
| | AGAGACTGGCTTGGCCAAAGTCACAAAGCTTAGTATTGGCTGAGCC | |
| | AGGATTTAAACCCAGGTTTTTCTGATCTTAAAGCCCCAAATCTCTC | |
| | CACCTCACAGTGCCCATTCTCTGACAATGTCTCATCATTTTGCAAA | |
| | GCAGCTCCAGTCCTGAGATGGCACTACTTGGGAGAAGTGGAAATGC | |
| | ACAGGTCCCTGTCCCTGGGGATCATGAGGAACCC[C/T]AGACACC | |
| | AAGGCTGGGCCCAGTCTTCTCCTAGTGCTGGCCCTCAAATGCCTCC | |
| | CGCTGACTCTCTCCCCTTCCCACAGGAGTGCCCCAGTGGTGTGGTC | |
| | AACGAAGACACATTCAAGCAGATCTATGCTCAGTTTTTCCCTCATG | |
| | GAGGTGAGTCTGACCTTGAAATCTATCTTGCCCAGCTCCCTCTCTG | |
| | GTAAGCAGCCTTCCCTTCCTCCAAGTCCTCTCTTCCTTGCCATTTG | |
| | CTTCCTTCTCGAGGAAGAGACAAACTCAGGGCAGGACACCTCCCTC | |
| | ATCGTGAGAGGTGGGAGTCTCCAAAGCTTTAGCAGGAAAGAACTCT | |
| | GAAAATGAACCCACCCTGGAAGGGGAAGAAGGGCTGATAATGCAAC | |
| | ATCACAACGTCTCAGAACAGCTCTAGAAAGCAGGTATTATAATCCC | |
| | AGATGGAGTAACTGAGTTTCGGGGAAGATAAGCAGTGTACTCAAGA | |
| | TTGCACAGCTGGTGAGTAGCAAACCAGGATTAGATTCCATAAGGGT | |
| | CTGAAACAGGTTTTGCCATGCTGGCACCACCATTGTGCAGGGCACT | |
| | TTTGAATCTTTTCCTTAAAATAGCTGAGACAAGCTGGAATTTTGTA | |
| | AAAGAACTTCAGTAAATACCGAAGACTATAAAAATAAACTAATTGA | |
| | AAAAGAGGCAGGAAACATAAAGTTGTGCTTATTAAGCCAGTTTACA | |
| | AGTGTGCCAGGCCCACAACAGCTGCTCTGTTGCCCTGCCCGACTCC | |
| | TGTGGGAACCAGCTGTGTCCCCATGGGCCTGGGACCACATCGGTGA | |
| | CTCCTCCTGTGGCCTCCATGTGTCACATGCCACTTTGCATCCTGTC | |
| | ACCAAGAGCTGTCTCCTGCAAGACATCTTCCCTGGATCCTGACAAA | |
| | ATGCAAATCCAAGTATTCCAAACACTTCTTGGGCCCTGTTTCTCAT | |
| | GGGCCTTTTTGGCAGCAGACAGATGCCTTCCTTGGTGTGTGGGGCC | |
| | CCTACCCAGATCAGGTGGGGGAGGCAG | |
| KCP_2278 | CCTCTGGTTCTGCATCACCTCCCCCTCTAAATCTCAAGGCATTCGG | SEQ ID NO. 230 |
| 71 | GGAAGGTCTGGACCATCAAAAGCTCTCAGTCAGACCAAAGACATGT | |
| | TTATCCATTTGTAAGCATTTCCTAAAGATGGGGAAAAGCAGCAGCA | |
| | ACTTTCCCTGGCCTGCAGGAACTCAGGGACTCAGGGGACTAATAAC | |
| | AACAGTGTATGAGCTTCCGGGCACACTGCTTCCCAGTGGCAGCCCC | |
| | TGTACTTAGGGCTTTGTATGTATTAATTCATTTACTCCAATTCCCA | |
| | CAATAACCCTATAGGGTAGGGTTTTATTATTGATTACCTTTTTACA | |
| | GAAGAGGAGAGTAAGGCAAAGAGAGATAGAGTAGTTTTCCCAAGGT | |
| | CAAAGAGCACATAAATGATAAAGGATGGATTTGAATGTAGGCAGAA | |
| | TGACCCTCAATACAGACTGTTCCTACAGTCCACGTCCTCAGCCACT | |
| | AGACCATACGGCCACTGGGATGATAGACAGACCACTGCAG[C/G]C | |
| | ATGGATAAGGCAAAAACAGGGCTGGCTGTGTTGATCTGTGTCTCTC | |
| | AGAGCTCCATTCTTCCTCAAGGGGGCACCTTGCAAAAAAAAACAAA | |
| | AAAATGGGGCAGGGTAGGGAACTGAAGGCAGGAGCTCTTCACAGAG | |
| | CATAGCCACATCCTCCAGGCAGACAAGAGGACGCAGGAGGCACCAT | |
| | TCTGTGAGAGTATCACAGTCTGACCCAAAGACACAGCTTCACACTG | |
| | TCTGATGGCTTGATGGTTAATGTCACTCTGCCTTTTCCCCTTCTCA | |
| | GGACTTTGTAACCGCTCTGTCGATTTTATTGAGAGGAACTGTCCAC | |
| | GAGAAACTAAGGTGGACATTTAATTTGTATGACATCAACAAGGACG | |
| | GATACATAAACAAAGAGGTAAGTGAGCTGGGGCCAGGGGTGTGAGA | |
| | GGGCTCCAGTGAAGGTAACTAACCCAACAGAAAACAGCCCCAGGCA | |
| | TGAGGATAGCACTGTCTGAATGAGGCAGGCTCTGCTTTG | |
| KCP_2279 | TGTGCCATTCATACACCAACGACTCCATGCATAGACAGGCAGGAGA | SEQ ID NO. 231 |
| 87 | ATGGTTTTCTCATGATGGCTAGAGGGAGGGGCAAGGGCTCATCTCA | |
| | CTTTTTGCTAGATCTAACTTCACACCCAAACCCAAAGAGTTGAGTC | |
| | AATGGGCCCCACTCCATAATTTTCTCCTTTCCATCACCCTAGCATC | |
| | ACTCTCCTCTCTTTCTTGTCGAAGCCCTGCCTTGTTTGGAAGGTTC | |
| | TCCCTGTGTGGAATTCCTGCCCCCATCACCTGCCCTCCTTTTCTGC | |
| | CTTGTAGATGCCAGCACGTATGCCCATTACCTCTTCAATGCCTTCG | |
| | ACACCACTCAGACAGGCTCCGTGAAGTTCGAGGTACGCTCATCTGG | |
| | GGTCCACTCTAGGGGTCCTCTGGTTCTGCATCACCTCCCCCTCTAA | |
| | ATCTCAAGGCATTGGGGGAAGGTCTGGACCATCAAAAGCTCTCAGT | |
| | CAGACCAAAGACATGTTTATCCATTTGTAAGCATTTCCTAAAGATG | |
| | GGGAAAAGCAGCAGCAACTTTCCCTGGCCTGCAGGAACTCAGGGAC | |
| | TCAGGGGACTAATAACAACAGTGTATGAGCTTCCGGGCACACTGCT | |
| | TCCCAGTGGCAGCCCCTGTACTTAGGGCTTTGTATGTATTAATTCA | |
| | TTTACTCCAATTCCCACAATAACCCTATAGGGTAGGGTTTTATTAT | |
| | TGATTACCTTTTTACAGAAGAGGAGAGTAAGGCAAAGAGAGATAGA | |
| | GTAGTTTTCCCAAGGTCAAAGAGCACATAAATGATAAAGGATGGAT | |
| | TTGAATGTAGGCAGAATGACCCTCAATACAGACTGTTCCTACAGTC | |
| | CACGTCCTCAGCCACTAGACCATACGGCCACTGGGATGATAGACAG | |
| | ACCACTGCAGCCATGGATAAGGCAAAAACAGGGCTGGCTGTGTTGA | |
| | TCTGTGTCTCTCAGAGCTCCATTCTTCCTCAAGGGGGCACCTTGCA | |
| | AAAAAAAACAAAAAAATGGGGCAGGGTAGGGAAC[C/T]GAAGGCA | |
| | GGAGCTCTTCACAGAGCATAGCCACATCCTCCAGGCAGACAAGAGG | |
| | ACGCAGGAGGCACCATTCTGTGAGAGTATCACAGTCTGACCCAAAG | |
| | ACACAGCTTCACACTGTCTGATGGCTTGATGGTTAATGTCACTCTG | |
| | CCTTTTCCCCTTCTCAGGACTTTGTAACCGCTCTGTCGATTTTATT | |
| | GAGAGGAACTGTCCACGAGAAACTAAGGTGGACATTTAATTTGTAT | |
| | GACATCAACAAGGACGGATACATAAACAAAGAGGTAAGTGAGCTGG | |
| | GGCCAGGGGTGTGAGAGGGCTCCAGTGAAGGTAACTAACCCAACAG | |
| | AAAACAGCCCCAGGCATGAGGATAGCACTGTCTGAATGAGGCAGGC | |
| | TCTGCTTTGGGGCTAACAGAGCTGGTCCCTGGCAAAATAAAGAAGG | |
| | CCTCCCTCATTGCCCTACCCTGCCCTGTTCCCAAGCGCCCAGAAAG | |
| | GATTAAACAGATTCATTCTCACTGGGTCACCTAGATTCAGTAGATA | |
| | TTACACAGTGGATAAAAATGACTTGTTTCAGTGTGAAGAGTTACTC | |
| | TTCCCTAGGGAACCTGCATTTGGGAAGGTTAGGAGCCACAAGTCAA | |
| | AGCTAAAAGTTGAAATGGTGGAATTGTAGGCAGCACCTAGAATAGA | |
| | AAAGAAAGATTTTTAAGGAAGAGGAACCTACAATTGGGTCATATTG | |
| | GCCTTAAACTATTTTGCCTATTAATACAACCGCCAAGGGGGTAATG | |
| | GAAGGTACAGCTGTCTTTACAGAAATTATCACAAATAATTTCTGAA | |
| | TCTTCACTGCTTTGCACTTTTAGAACCTCAGAGGACATGTCTCTAG | |
| | CCAGTGAAATACCCTCAGGTCTATCTCAAAACTCACTTTGGTATCC | |
| | ACTGTATCCTGGTATCTCAGTGGAAGCTGGAAATTGGCATCCTGTA | |
| | ACACTCCACTTGCTGAGCTCCTGTGTGCCAGGCACGGTGCCTGGAG | |
| | GTATAGATATCAGCACCAATCTTCACC | |
| KCP_2281 | TAGGGCTTTGTATGTATTAATTCATTTACTCCAATTCCCACAATAA | SEQ ID NO. 232 |
| 07 | CCCTATAGGGTAGGGTTTTATTATTGATTACCTTTTTACAGAAGAG | |
| | GAGAGTAAGGCAAAGAGAGATAGAGTAGTTTTCCCAAGGTCAAAGA | |
| | GCACATAAATGATAAAGGATGGATTTGAATGTAGGCAGAATGACCC | |
| | TCAATACAGACTGTTCCTACAGTCCACGTCCTCAGCCACTAGACCA | |
| | TACGGCCACTGGGATGATAGACAGACCACTGCAGCCATGGATAAGG | |
| | CAAAAACAGGGCTGGCTGTGTTGATCTGTGTCTCTCAGAGCTCCAT | |
| | TCTTCCTCAAGGGGGCACCTTGCAAAAAAAAACAAAAAAATGGGGC | |
| | AGGGTAGGGAACTGAAGGCAGGAGCTCTTCACAGAGCATAGCCACA | |
| | TCCTCCAGGCAGACAAGAGGACGCAGGAGGCACCATTCTGTGAGAG | |
| | TATCACAGTCTGACCCAAAGACACAGCTTCACACTGTCTG[A/T]T | |
| | GGCTTGATGGTTAATGTCACTCTGCCTTTTCCCCTTCTCAGGACTT | |
| | TGTAACCGCTCTGTCGATTTTATTGAGAGGAACTGTCCACGAGAAA | |
| | CTAAGGTGGACATTTAATTTGTATGACATCAACAAGGACGGATACA | |
| | TAAACAAAGAGGTAAGTGAGCTGGGGCCAGGGGTGTGAGAGGGCTC | |
| | CAGTGAAGGTAACTAACCCAACAGAAAACAGCCCCAGGCATGAGGA | |
| | TAGCACTGTCTGAATGAGGCAGGCTCTGCTTTGGGGCTAACAGAGC | |
| | TGGTCCCTGGCAAAATAAAGAAGGCCTCCCTCATTGCCCTACCCTG | |
| | CCCTGTTCCCAAGCGCCCAGAAAGGATTAAACAGATTCATTCTCAC | |
| | TGGGTCACCTAGATTCAGTAGATATTACACAGTGGATAAAAATGAC | |
| | TTGTTTCAGTGTGAAGAGTTACTCTTCCCTAGGGAACCTGCATTTG | |
| | GGAAGGTTAGGAGCCACAAGTCAAAGCTAAAAGTTGAAA | |
| KCP_2325 | ATTTCTTAAAGTAGATAAATTTGACTTTATCAAAGTTAAAAATTTT | SEQ ID NO. 233 |
| 21 | GTGCTTTAGAAGACACCTTTAAGAAAATGGAAATGCAAGCCATGGA | |
| | CTTGGAAAAAATGTTTGCAAATTATATACCAGATATATAAAGATAC | |
| | CAGGATACCAAACCAATATAAAGACTGGCATCCAAAATATATAAGG | |
| | GACATTTATAATTTAATACAAAGATAAACAACTTCATATAAAATAG | |
| | GCAAAAGATTTGATGAGATATTTAAGAAAAGAAGATATATGAATGG | |
| | CCAGTAAACCCATGAAAGGTTGCTCTATATCACTGGTCTTCAAAGA | |
| | AATGCAAATTATAACTATAATGAAATACAATTGCACAGAATGGCCA | |
| | CAATTAAAAAGACTGATAATACCAAGCATTGGCAAAGATGTGGAGC | |
| | AATAGAAACTCTCATAGATAGCTGGCAGAAATGTAAATGGTACAAA | |
| | CACGTTGGGAAACATTTTGGCATCTTTGATAAAGCTCACCACACAC | |
| | TTAACATACAACCCAGAAATCCCATTCCAGTCAGGCATGGTGGCTT | |
| | ACGCCTATAATCCCAGTACTTTGGGAGGCTGAGGCAGGCGGATCAC | |
| | TTGAGCTCAGGTGTTCAAGACCAGACTGGGCAACATGGCGAGACAC | |
| | TGTCTCTACTAAAAATACAAAAAAAAAAAAAAAAAAAGCCAGACAT | |
| | GGTGGTAAGCACCTGTGGTCCCAGCTACTAGGGAGGCTGAGGTGGG | |
| | AGAATTGCTTAACCCTGGGGAGTGGAGGTTGCAGTGAGCTGAGATT | |
| | GCACCACTGCACTCCAGCCTGGGTGACAGAGCAAGACCCTGTCTCA | |
| | AAAAAAGAAAAAAAGAAGAAGAAAAGAAGTCCCACTCCTGGATATT | |
| | TACCCCCAAAAGAAAAATATGTAATTCCATAAAGACTTGTACAAAG | |
| | ATGTTCATAGCAGCTTTATTCATAGTAATCTCAAAACTTAAATGAC | |
| | CCAAATGTCTGTCAACAGGACAATGGGTAAATAC[A/T]TCATAGT | |
| | CTGTTCATCCAATGGAATATTACTCAGCAGTAAAAAGGAATGTTAT | |
| | AGTTGCATGCAGCAATGTGTATGAAGCTCATAAACCTCATGCTGAG | |
| | TAAATGAAGCCAGACGCAAATGAGTTTACACTGTTTTACTCCATTT | |
| | ACATGAGATTTTAGAAAATACAAACTAATCTATAGTAACAGAAATT | |
| | AGATCTGTGGTTGCCTGGTGTCAAAGCTTGAGAGGCACTCACTGCG | |
| | AAGAAGTGTGAAGGGATGTCTTTTGGTTGTGAAAATGTTCTATATC | |
| | TTGAGTGTGGTGGAGGTTACATGGGTGGATACATTTGTCAACATTC | |
| | ATCAAACAGTACACTTAAAATGGGTGAATTTGTTATAAGTAAATTA | |
| | TGCTCCAATAAATTTGATTTATTTGTTGAAAAACTTGGTGTAAGGG | |
| | GGAAGTGCCTAACCAATAGAAGACACTCAAAAAATGTGTTGAAGGA | |
| | AAAAAATCCTGTGAAATAAAGCAGGTAAGAGAAAATAAGAACTCAA | |
| | TATCATCCAAAATATAGATTACAAATCCTAAATGAGATAATAGGAA | |
| | ATTAATCCCAGTGCTCTGTTTAAAGGCTCATACCTGTAATCCCAAC | |
| | ACTTTGGGAGACTGAGGCAGGACGATGGGTTGAGCCCAGGAGTTCA | |
| | AGACCAGCCTGGTCAACATAGGGAGAGCCTGTCTCTTCAAAACAAA | |
| | AATTTAAAAATTACCTGGGTGTAGTGGCACGTGCCTGTGCTCCCAG | |
| | CTACTCCAGAGGCTGAGGCAGGAGGATAGCTTGAGCCCAGGAGTTC | |
| | AAGCCTGCCCTGAGCCATAATCACTGCACCACACTCCAGCCTGGGC | |
| | AACAGAACAAGACCCTTCCTCAAAAAAGCAATAAAATAAAATAAAG | |
| | AAATGCACATGACTAACATAGGGTTTATTCCAGGAATGCAGGAATA | |
| | GCCCAGTAGCAGAGAAAGCCTATTAAATAATTTATCACATTAATAT | |
| | ATCAAAAGATCAAACCATTTGATGCTA | |
| KCP_2336 | TTTACTCCATTTACATGAGATTTTAGAAAATACAAACTAATCTATA | SEQ ID NO. 234 |
| 55 | GTAACAGAAATTAGATCTGTGGTTGCCTGGTGTCAAAGCTTGAGAG | |
| | GCACTCACGCGAAGAAGTGTGAAGGGATGTCTTTTTGGTTGTGAAA | |
| | ATGTTCTATATCTTGAGTGTGGTGGAGGTTACATGGGTGGATACAT | |
| | TTGTCAACATTCATCAAACAGTACACTTAAAATGGGTGAATTTGTT | |
| | ATAAGTAAATTATGCTCCAATAAATTTGATTTATTTGTTGAAAAAC | |
| | TTGGTGTAAGGGGGGAAGTGCCTAACCAATAGAAGACACTCAAAAA | |
| | TGTGTTGAAGGAAAAAAATCCTGTGAAATAAAGCAGGTAAGAGAAA | |
| | ATAAGAACTCAATATCATCCAAAATATAGATTACAAATCCTAAATG | |
| | AGATAATAGGAAATTAATCCCAGTGCTCTGTTTAAAGGCTCATACC | |
| | TGTAATCCCAACACTTTGGGAGACTGAGGCAGGAGGATGGGTTGAG | |
| | CCCAGGAGTTCAAGACCAGCCTGGTCAACATAGGGAGAGCCTGTCT | |
| | CTTCAAAACAAAAATTTAAAAATTACCTGGGTGTAGTGGCACGTGC | |
| | CTGTGCTCCCAGCTACTCCAGAGGCTGAGGCAGGAGGATAGCTTGA | |
| | GCCCAGGAGTTCAAGCCTGCCCTGAGCCATAATCACTGCACCACAC | |
| | TCCAGCCTGGGCAACAGAACAAGACCCTTCCTCAAAAAAGCAATAA | |
| | AATAAAATAAAGAAATGCACATGACTAACATAGGGTTTATTCCAGG | |
| | AATGCAGGAATAGCCCAGTAGCAGAGAAAGCCCTATTAAATAATTA | |
| | TCACATTAATATATCAAAAGATCAAACCATTTGATGCTAAAATCAC | |
| | ATTTGATATAATTTACCATTTATTCATAATAATTTTCAGGATTCAA | |
| | TTAATTAGGAATAAAATACTTCTTCAGCATAATAGAAAATACCCCA | |
| | GCCTGGTACACAGCTTCATACTTTATGGTAACAC[A/G]CGGAGAT | |
| | TCTCACTGAAGAAAAGATGAGGCAAGAAAAGATGATGAAGAAAAGA | |
| | TGAGGCAAGAAAAGATGATGTCTGCACACTGTCAGACATCACCACT | |
| | GTTTAACATTTCCTGAAAGCTCTTCAAACACAGTGAAACAGAAAAG | |
| | GAAATGCGATCTAAATAGGAAAAATTACAACATTCCTTGTTAATGA | |
| | CATGATTTTCTATCTGAGAAAAAAGACAGCAAGAAAATCAACTTAA | |
| | AACAACTAGAACTTTTAAAAAGCTGGCAAAGTGACTGGTAATAAAA | |
| | TACATATGCAAAAAGAAATTGTGTAGCCAATATATCAGTTGTGACT | |
| | AGCTAGAAAATTGTAATACAAATATTCTCATTGTGATCACAATAAA | |
| | ATTTAAAGCACATGGGCATTTTTAAATATCCATAATTTAGATGAAG | |
| | AGAAAGAAAATTTTGATAAGTAGAGAAACATACCATCTTCTGAAAG | |
| | GATGTATATTATAAAGATAGCAATATTATAATGACAGCAATTCTTC | |
| | TCTAATTAAATTTATTTTATTTTGAATCAAAATGGAAGTGTTATTT | |
| | GGGAAGGAAATTTGGCACAATTGTTATAAAGTTACATTGGAAGATT | |
| | AATCAGATGAAAATAGCAAAGATAATTTTCAAAAAGAAGAAAAATG | |
| | GTGGGATTTGTTCTACCAGATACTGAAATATATTATAAAGCTGAAA | |
| | CTATTAAAATATTATAATATCAGAGAAGGAACAGGTAGATCAATGG | |
| | AACAAAATAGAAATCCCAGGTACAAATACCATCTTGGTTCATAATA | |
| | AAGGGAGCATATTGAATAGAGAGGTAATGAATCATTAAATGATTCT | |
| | TGGAAAACTGGTTAACTATTTTGGCAATAAGTAAGTAAATATTCTT | |
| | ACTCGGTACCATAAACACAAAATCACTATAGATATGTACAGTTGCT | |
| | TTTTAACTAAAAAAGAACTAAAAATCATATGTGAATATCTGATCAA | |
| | AGAATGGAAAAGCATAAAATCAAAGT | |
| KCP_2375 | GCCTGTAGTCCCAGCTACTTGAGAGGCTGAGGCGGGAGGATCACTT | SEQ ID NO. 235 |
| 05 | GAACCCGGGAGGTCGAGGCTGCAGTGACGGGGATTGTGCCACTGCA | |
| | CTCCAGCCTGGGTGACAGAGCAAGAACCTGTCTCAAAAAAAAAAAA | |
| | AAAGAAAAAAGAAAAAAAGAATGAGAAACTCATACAGATTAGAAGA | |
| | GACTAAGGACACACAACAAATAAATGCAATGTAGAATCATTGAAGG | |
| | GAAAAAAATATTAGTTGAAAAGCTGAGATCCCGCCACTGCACTCCA | |
| | GCCTGGGCCACAGAGCGAGACTCCGTCTCAAAAAAAAAAAAAAAAA | |
| | AAAAAAAAAAAAAGAAAAGCTGATAAAATTTGAATAAGCCCTGTAG | |
| | TTTAGTTAATAATAGTGAAGCCATGTTAATTTCCTGGGTTTGGTCA | |
| | TTGTGCTCTGGTTATGCAAGTTGTTAACATTAGAGGAGACTGAGTG | |
| | AAAGGTATGCATGAACTCTCTGTACTAATTTTGTAAATTT[C/T]C | |
| | TGTAAGTCTAAAATTATTCATAATATGCAAAAATTAAACAAAAAAT | |
| | AAAATAAAATAAGCACATGGAATGAGACTGTCCCCTGGGTCTCTGT | |
| | AGAAACCAGGTCAAACATCCCAAATGCTCTTTTACCCCCATTCTGA | |
| | GTTGGGCCAGAATGGTCAGAATAATGGTTCCCAATGTACCTTGATA | |
| | AACACGGAAACTCTCAGGACCGAGTCCTAAGGTTCTCTGATTCAAT | |
| | AGGTTTGGAGTGGACTTGAGAACTGATCTTTTTAATAAGGGCCTCA | |
| | GTCTGTGGAACTATTGGCCTCATGTGCCCTGTGGATAATCTTGGCT | |
| | GTTGGTTCATTTTTCTTAACTGAAAACAGTGGCAGAAACTATGGGG | |
| | ATTTTTAAATCTCTAGGCTAGAACATTAACTTTTTAAAAATTCAGA | |
| | ATAGTATTTTATTTGCCTCAAGCCTGTGAATGGGGATCCCACAAAT | |
| | CACCCCCCACTGAAGACAATGCCCATAACAAGGTAACCT | |
| KCP_1540 | TTATGCAAGTTGTTAACATTAGAGGAGACTGAGTGAAAGGTATGCA | SEQ ID NO. 236 |
| 0 | TGAACTCTCTGTACTAATTTTGTAAATTTTCTGTAAGTCTAAAATT | |
| | ATTCATAATATGCAAAAATTAAACAAAAAATAAAATAAAATAAGCA | |
| | CATGGAATGAGACTGTCCCCTGGGTCTCTGTAGAAACCAGGTCAAA | |
| | CATCCCAAATGCTCTTTTACCCCCATTCTGAGTTGGGCCAGAATGG | |
| | TCAGAATAATGGTTCCCAATGTACCTTGATAAACACGGAAACTCTC | |
| | AGGACCGAGTCCTAAGGTTCTCTGATTCAATAGGTTTGGAGTGGAC | |
| | TTGAGAACTGATCTTTTTAATAAGGGCCTCAGTCTGTGGAACTATT | |
| | GGCCTCATGTGCCCTGTGGATAATCTTGGCTGTTGGTTCATTTTTC | |
| | TTAACTGAAAACAGTGGCAGAAACTATGGGGATTTTTAAATCTCTA | |
| | GGCTAGAACATTAACTTTTTAAAAATTCAGAATAGTATTTTATTTG | |
| | CCTCAAGCCTGTGAATGGGGATCCCACAAATCACCCCCCACTGAAG | |
| | ACAATGCCCATAACAAGGTAACCTACCCATGAGCTTCTGAGGGATT | |
| | TAGGAATTGTCTACCATCTCCTCTCTAAGAAGGGCTCCCACAATAT | |
| | ATCCCCTTCTGCTTGCTTCTAACTCCCTATCACCTGCTAAAGAAGG | |
| | ACCTCACCTTTTAATCACTTTCATTGCCAAGGGGCACAAGGAGCCC | |
| | CAAACTCTGTCACCTAGGAAGAGCTTGACCTCATGGTTTCCACACT | |
| | GTGTGCTTTTATGTCCCTGCTCCAGGAGATGATGGACATTGTCAAA | |
| | GCCATCTATGACATGATGGGGAAATACACATATCCTGTGCTCAAAG | |
| | AGGACACTCCAAGGCAGCATGTGGACGTCTTCTTCCAGGTAAGTGC | |
| | ACACACCCTGCACATGAGCTGTAAGCCCAGCCTAGATCAAGTCAAC | |
| | CCACGAGCATCTGAGCAAATGATTTGTGTCCAAC[C/T]CTGTACT | |
| | AAGCATGGTTGGTAACAGAAAAGAATTATAAGATACATTGTCCTCA | |
| | AGAAACAGATGATCTCCTTAAGCTGCAAGTGTACATGACAGAAGAG | |
| | AACAAGAAAGTATATTATTAAACGCTAGTGGTATAGTATGAACTCT | |
| | AAATCCATAAAAATTTGGGGATCAGGGTAAACACGAAAGACTTCAT | |
| | TAATTACAACTGTGGAGGTGTTAAGCATTTGTGTCTGGGAAGTAAG | |
| | GGGAAATAAGATTGGAAACTAGGATAGGGCCAGATTATGAGACCTT | |
| | TAAATGGAAGAGTTTGGCCTTGCTCTGGTACAGGATGGGCAGCTAG | |
| | TGCTGATCCTTGACTAAGGGAGTGGTATAATCATTGGGGCATTTTA | |
| | GGAAAAAATTAATCTAGCGGTGGAGTATCAGAGAATATCAAGAGTT | |
| | CACTCTAGTTCAACCTCCCACTTTGCAGATGGGAAAAGAGAGTCCT | |
| | CTCTGGCCTTGTGCAAGTTTGTACAGCAAGTAACAGGCCAGAATCA | |
| | GAACCTCTTTTGCCCAGTGTTCTGCCAGATGGACAGGGTAGCAGGG | |
| | AGTCTACAGAAGAAGCAGAATAAGCCACCAGTGAGGTGATGAGTGT | |
| | CCAGAGCAAGTCTTTTGATTTAAGGAAGCTCATGGGGCTCAAAGTG | |
| | TTGTAATCAGGACCTAATTGGAGTTGTCTGGCCAGTGAAAGACAAC | |
| | TCTCATTCTCAGGGCAAAGTTGGTTAATGAAATGAATGAAATGAGC | |
| | TCCAGCTCGTTACTCTGAGCTCCAGCAAGAAAGCAGGGGAGTAAGC | |
| | TTTGGAATGGAGATCACCAGATTCTGTAAAGTGCTTTCTGTTATGT | |
| | CTTTCAGAAAATGGACAAAAATAAAGATGGCATCGTAACTTTAGAT | |
| | GAATTTCTTGAATCATGTCAGGAGGTAAGGAGAGATCTCAGGGCAC | |
| | AATAACTCTACATCTGGGAAAGGAAACCTGGGGCCTGGGGACCTGC | |
| | AGAAGGAAGGTGATGAGAAACCTGCAC | |
| KCP_2385 | TCTAACTCCCTATCACCTGCTAAAGAAGGACCTCACCTTTTAATCA | SEQ ID NO. 237 |
| 91 | CTTTCATTGCCAAGGGGCACAAGGAGCCCCAAACTCTGTCACCTAG | |
| | GAAGAGCTTGACCTCATGGTTTCCACACTGTGTGCTTTTATGTCCC | |
| | TGCTCCAGGAGATGATGGACATTGTCAAAGCCATCTATGACATGAT | |
| | GGGGAAATACACATATCCTGTGCTCAAAGAGGACACTCCAAGGCAG | |
| | CATGTGGACGTCTTCTTCCAGGTAAGTGCACACACCCTGCACATGA | |
| | GCTGTAAGCCCAGCCTAGATCAAGTCAACCCACGAGCATCTGAGCA | |
| | AATGATTTGTGTCCAACCCTGTACTAAGCATGGTTGGTAACAGAAA | |
| | AGAATTATAAGATACATTGTCCTCAAGAAACAGATGATCTCCTTAA | |
| | GCTGCAAGTGTACATGACAGAAGAGAACAAGAAAGTATATTATTAA | |
| | ACGCTAGTGGTATAGTATGAACTCTAAATCCATAAAAATT[C/T]G | |
| | GGGATCAGGGTAAACACGAAAGACTTCATTAATTACAACTGTGGAG | |
| | GTGTTAAGCATTTGTGTCTGGGAAGTAAGGGGAAATAAGATTGGAA | |
| | ACTAGGATAGGGCCAGATTATGAGACCTTTAAATGGAAGAGTTTGG | |
| | CCTTGCTCTGGTACAGGATGGGCAGCTAGTGCTGATCCTTGACTAA | |
| | GGGAGTGGTATAATCATTGGGGCATTTTAGGAAAAAATTAATCTAG | |
| | CGGTGGAGTATCAGAGAATATCAAGAGTTCACTCTAGTTCAACCTC | |
| | CCACTTTGCAGATGGGAAAAGAGAGTCCTCTCTGGCCTTGTGCAAG | |
| | TTTGTACAGCAAGTAACAGGCCAGAATCAGAACCTCTTTTGCCCAG | |
| | TGTTCTGCCAGATGGACAGGGTAGCAGGGAGTCTACAGAAGAAGCA | |
| | GAATAAGCCAGCAGTGAGGTGATGAGTGTCCAGAGCAAGTCTTTTG | |
| | ATTTAGGAGCTCATGGGGCTCAAAGTGTTGTAATCAG | |
| KCP_1615 | GGAAGAGCTTGACCTCATGGTTTCCACACTGTGTGCTTTTATGTCC | SEQ ID NO. 238 |
| 2 | CTGCTCCAGGAGATGATGGACATTGTCAAAGCCATCTATGACATGA | |
| | TGGGGAAATACACATATCCTGTGCTCAAAGAGGACACTCCAAGGCA | |
| | GCATGTGGACGTCTTCTTCCAGGTAAGTGCACACACCCTGCACATG | |
| | AGCTGTAAGCCCAGCCTAGATCAAGTCAACCCACGAGCATCTGAGC | |
| | AAATGATTTGTGTCCAACCCTGTACTAAGCATGGTTGGTAACAGAA | |
| | AAGAATTATAAGATACATTGTCCTCAAGAAACAGATGATCTCCTTA | |
| | AGCTGCAAGTGTACATGACAGAAGAGAACAAGAAAGTATATTATTA | |
| | AACGCTAGTGGTATAGTATGAACTCTAAATCCATAAAAATTTGGGG | |
| | ATCAGGGTAAACACGAAAGACTTCATTAATTACAACTGTGGAGGTG | |
| | TTAAGCATTTGTGTCTGGGAAGTAAGGGGAAATAAGATTGGAAACT | |
| | AGGATAGGGCCAGATTATGAGACCTTTAAATGGAAGAGTTTGGCCT | |
| | TGCTCTGGTACAGGATGGGCAGCTAGTGCTGATCCTTGACTAAGGG | |
| | AGTGGTATAATCATTGGGGCATTTTAGGAAAAAATTAATCTAGCGG | |
| | TGGAGTATCAGAGAATATCAAGAGTTCACTCTAGTTCAACCTCCCA | |
| | CTTTGCAGATGGGAAAAGAGAGTCCTCTCTGGCCTTGTGCAAGTTT | |
| | GTACAGCAAGTAACAGGCCAGAATCAGAACCTCTTTTGCCCAGTGT | |
| | TCTGCCAGATGGACAGGGTAGCAGGGAGTCTACAGAAGAAGCAGAA | |
| | TAAGCCAGCAGTGAGGTGATGAGTGTCCAGAGCAAGTCTTTTGATT | |
| | TAAGGAAGCTCATGGGGCTCAAAGTGTTGTAATCAGGACCTAATTG | |
| | GAGTTGTCTCGCCAGTGAAAGACAACTCTCATTCTCAGGGCAAAGT | |
| | TGGTTAATGAAATGAATGAAATGAGCTCCAGCTC[A/G]TTACTCT | |
| | GAGCTCCAGCAAGAAAGCAGGGGAGTAAGCTTTGGAATGGAGATCA | |
| | CCAGATTCTGTAAAGTGCTTTCTGTTATGTCTTTCAGAAAATGGAC | |
| | AAAAATAAAGATGGCATCGTAACTTTAGATGAATTTCTTGAATCAT | |
| | GTCAGGAGGTAAGGAGAGATCTCAGGGCACAATAACTCTACATCTG | |
| | GGAAAGGAAACCTGGGGCCTGGGGACCTGCAGAAGGAAGGTGATGA | |
| | GAAACCTGCACATACCTGCAACCCCTCCCATCAGAGCCAACAACAC | |
| | CAGCAACAACTGTGAAGTCCACAGTTCCACTCCTCAACCTGACCTG | |
| | CAGTTGGTCTTGGCTAAGCACAAGACTGAACAGAGAGCCTAAGTAG | |
| | GGGTCTGGGGGCATGTGAAAACTCAGAGGGGGTCTCTGTGAAAATA | |
| | GACTTCCCGAGAGGGCAACACCATTATTTTTTAGCCTGCCTCTGGC | |
| | TTGATGACCCATTTCCCAGACTACAAGGAAGCAGCTGGGGGGAAAA | |
| | AAACCTACAATTGTGTGATTCTCAAACCACAGTGTGCATAAAAATT | |
| | GCCTGGAATGATTCTGAAAATGCATATTTCCAGGCCTCAATCCCAG | |
| | AGACTCTAGATCTGGGTCACTTTAACACAAATGTCCTGGACCAATG | |
| | CTTCTAACACTTTAATGTGTGAAACAATATCCTTGATGATTTTGTT | |
| | AAAATGCAGATTCTAATTCCATAGGTCTGGGGTAGGGCCTGAGATG | |
| | TTACTTTTCTCACATTCTCCCCAGTCACACTGGTGATGCTGATCCT | |
| | GGGAACACAACTTTCATTAAGTCTAACCAATAGACCAGCCCCAGAG | |
| | TCCACCAGAGACTGAACTGGAAATAATTGCTTCATCTACTTTTGAG | |
| | AAATCCATTTGTACCCCCACATTATTTTAGAAATGTTCAGAGTTAC | |
| | TCTGAGCTCCAGCCAAGAAGAATAGCAAATGTAAGAAAGCCGGGGA | |
| | GAAGTTCCTAGCAGATACTGAGCCCCC | |
| KCP_1806 | TTGAAAGAGAGCGCTTTGGGGGGTTTTCTTACTGTATGTCTCTATT | SEQ ID NO. 239 |
| 9 | GCATGTTCTGTATTTTACATTTTTCTATTATTTCTTCTCTGAGGTA | |
| | TAGTATTGAATGTAGAAAAATCCTCAAATGTTCGGTATTAAGCAAT | |
| | ACACTTCTAATTCATGGTTCAGAGAAGAAAATATCTCGAATAAAAA | |
| | TAAAATAAAAATATGACTTATCAAAATTTGTAGGATCTAAAGCAGT | |
| | ATTCCAGGAATGCAAGGTTGGTTTAACATTCAATAATTGGTCAGTG | |
| | TAATTAATCACATTAATAGAATAAAAAGAGAAAAAATATAATCATT | |
| | TCAGTGGATGTAATTGTTCAGAGCTTCTTAAAAGAAGCAACTCACT | |
| | ATTTTACTAGATGATTTGTTTCTTCTGAATTCCTCTTTAAGGCTAC | |
| | AGGTGGTGCTTCTTACTTTGAACTGATCACTTTCTAGGTCCCCACC | |
| | CTTACTTCTTGTTTTTCATACCCTTGTAGAGTTTTCTCCA[C/T]A | |
| | TAGGAAACCCATGCTTGACATTTGCTCACCAGAGTTACAGAGCTCT | |
| | CAGGGAGGAGACTCAGAGTTCTAACCCTCTTGCCCTCCTTTTTTCC | |
| | CAGGACGACAACATCATGAGGTCTCTCCAGCTGTTTCAAAATGTCA | |
| | TGTAACTGGTGACACTCAGCCATTCAGCTCTCAGAGACATTGTACT | |
| | AAACAACCACCTTAACACCCTGATCTGCCCTTGTTCTGATTTTACA | |
| | CACCAACTCTTGGGACAGAAACACCTTTTACACTTTGGAAGAATTC | |
| | TCTGCTGAAGACTTTCTATGGAACCCAGCATCATGTGGCTCAGTCT | |
| | CTGATTGCCAACTCTTCCTCTTTCTTCTTCTTGAGAGAGACAAGAT | |
| | GAAATTTGAGTTTGTTTTGGAAGCATGCTCATCTCCTCACACTGCT | |
| | GCCCTATGGAAGGTCCCTCTGCTTAAGCTTAAACAGTAGTGCACAA | |
| | AATATGCTGCTTACGTGCCCCCAGCCCACTGCCTCCAAG | |
| KCP_2415 | ACTTTGAACTGATCACTTTCTAGGTCCCCACCCTTACTTCTTGTTT | SEQ ID NO. 240 |
| 27 | TTCATACCCTTGTAGAGTTTTCTCCATATAGGAAACCCATGCTTGA | |
| | CATTTGCTCACCAGAGTTACAGAGCTCTCAGGGAGGAGACTCAGAG | |
| | TTCTAACCCTCTTGCCCTCCTTTTTTCCCAGGACGACAACATCATG | |
| | AGGTCTCTCCAGCTGTTTCAAAATGTCATGTAACTGGTGACACTCA | |
| | GCCATTCAGCTCTCAGAGACATTGTACTAAACAACCACCTTAACAC | |
| | CCTGATCTGCCCTTGTTCTGATTTTACACACCAACTCTTGGGACAG | |
| | AAACACCTTTTACACTTTGGAAGAATTCTCTGCTGAAGACTTTCTA | |
| | TGGAACCCAGCATCATGTGGCTCAGTCTCTGATTGCCAACTCTTCC | |
| | TCTTTCTTCTTCTTGAGAGAGACAAGATGAAATTTGAGTTTGTTTT | |
| | GGAAGCATGCTCATCTCCTCACACTGCTGCCCTATGGAAG[G/T]T | |
| | CCCTCTGCTTAAGCTTAAACAGTAGTGCACAAAATATGCTGCTTAC | |
| | GTGCCCCCAGCCCACTGCCTCCAAGTCAGGCAGACCTTGGTGAATC | |
| | TGGAAGCAAGAGGACCTGAGCCAGATGCACACCATCTCTGATGGCC | |
| | TCCCAAACCAATGTGCCTGTTTCTCTTCCTTTGGTGGGAAGAATGA | |
| | GAGTTATCCAGAACAATTAGGATCTGTCATGACCAGATTGGGAGAG | |
| | CCAGCACCTAACATATGTGGGATAGGACTGAATTATTAAGCATGAT | |
| | ATTGTCTGATGACCCAAACTGCCCATGTCATTTGTTTCCAGAAACG | |
| | AGGACCAATAATTCTCTCACACTGGCATTTGTGCTGGTAGTACAAG | |
| | TCCTTTAATATGTCCAGGAAGGGAGCCATTGCCCAGTGGTCCATAT | |
| | CTCCACCACATCCCCTGCTTGAGCCCAGCGCTGCATGTCCCTCCCA | |
| | AGAAGTCCAGAATGCCTGCAAATTGCTGTAATTTTATAC | |
| KCP_2418 | CTGATCTGCCCTTGTTCTGATTTTACACACCAACTCTTGGGACAGA | SEQ ID NO. 241 |
| 04 | AACACCTTTTACACTTTGGAAGAATTCTCTGCTGAAGACTTTCTAT | |
| | GGAACCCAGCATCATGTGGCTCAGTCTCTGATTGCCAACTCTTCCT | |
| | CTTTCTTCTTCTTGAGAGAGACAAGATGAAATTTGAGTTTGTTTTG | |
| | GAAGCATGCTCATCTCCTCACACTGCTGCCCTATGGAAGGTCCCTC | |
| | TGCTTAAGCTTAAACAGTAGTGCACAAAATATGCTGCTTACGTGCC | |
| | CCCAGCCCACTGCCTCCAAGTCAGGCAGACCTTGGTGAATCTGGAA | |
| | GCAAGAGGACCTGAGCCAGATGCACACCATCTCTGATGGCCTCCCA | |
| | AACCAATGTGCCTGTTTCTCTTCCTTTGGTGGGAAGAATGAGAGTT | |
| | ATCCAGAACAATTAGGATCTGTCATGACCAGATTGGGAGAGCCAGC | |
| | ACCTAACATATGTGGGATAGGACTGAATTATTAAGCATGA[C/T]A | |
| | TTGTCTGATGACCCAAACTGCCCATGTCATTTGTTTCCAGAAACGA | |
| | GGACCAATAATTCTCTCACACTGGCATTTGTGCTGGTAGTACAAGT | |
| | CCTTTAATATGTCCACGAAGGGAGCCATTGCCCAGTGGTCCATATC | |
| | TCCACCACATCCCCTGCTTGAGCCCAGCGCTGCATGTCCCTCCCAA | |
| | GAAGTCCAGAATGCCTGCAAATTGCTGTAATTTTATACCATGTTCT | |
| | AACCAATAAACAGAACTATTTCTTACACTCTCAATCACTTCTTCAT | |
| | GACTCCGTTAGGTAAGAGAGGTAAGCTGTGAAAAGGGAAGGCTAGT | |
| | CCATTCATTTGACACCCAATTATTAGTGCAGTTGTCCCTCCATATG | |
| | TGTGAAGGATCAGTCCCAGGACTCTCCATACCAAAATCTGCAGATA | |
| | CTCAAGTCCCACAGCTAGCCCTGAGGGACTCGTGTTTTCAGAAAAT | |
| | TTGGCCTCCATATATGCAGGTTTCACATCCTATAAATAC | |
| KCP_1324 | CCCAAGCTCAACCATTCCAATGCCATCTCCTCTGGTTCCAGATAAG | SEQ ID NO. 242 |
| | ATTGAAGATGAGCTGGAGATGACCATGGTTTGCCATCGGCCCGAGG | |
| | GACTGGAGCAGCTCGAGGCCCAGACCAACTTCACCAAGAGGGAGCT | |
| | GCAGGTCCTTTATCGAGGCTTCAAAAATGTAAGACCCGTGCACGCT | |
| | CTGAAGGCCTGGGGGG | |
| KCP_1520 | TTGTCTACCATCTCCTCTCTAAGAAGGGCTCCCACAATATATCCCC | SEQ ID NO. 243 |
| 4 | TTCTGCTTGCTTCTAACTCCCTATCACCTGCTAAAGAAGGACCTCA | |
| | CCTTTTAATCACTTTCATTGCCAAGGGGCACAAGGAGCCCCAAACT | |
| | CTGTCACCTAGGAAGAGCTTGACCTCATGGTTTCCACACTGTGTGC | |
| | TTTTATGTCCCTGCTC | |
| KCP_4957 | ACCCTCAATACAGACTGTTCCTACAGTCCACGTCCTCAGCCACTAG | SEQ ID NO. 244 |
| | ACCATACGGCCACTGGGATGATAGACAGACCACTGCAGCCATGGAT | |
| | AAGGCAAAAACAGGGCTGGCTGTGTTGATCTGTGTCTCTCAGAGCT | |
| | CCATTCTTCCTCAAGGGGGCACCTTGCAAAAAAAAACAAAAAAATG | |
| | GGGCAGGGTAGGGAAC | |
| KCP_5011 | GCCACTGGGATGATAGACAGACCACTGCAGCCATGGATAAGGCAAA | SEQ ID NO. 245 |
| | AACAGGGCTGGCTGTGTTGATCTGTGTCTCTCAGAGCTCCATTCTT | |
| | CCTCAAGGGGGCACCTTGCAAAAAAAAACAAAAAAATGGGGCAGGG | |
| | TACGGAACTGAACGCAGGAGCTCTTCACAGAGCATAGCCACATCCT | |
| | CCACGCACACAAGAGG | |
| KCP_5051 | GGCAAAAACAGGGCTGGCTGTGTTGATCTGTGTCTCTCAGAGCTCC | SEQ ID NO. 246 |
| | ATTCTTCCTCAAGGGGGCACCTTGCAAAAAAAAACAAAAAAATGGG | |
| | GCAGGGTAGGGAACTGAAGGCAGGAGCTCTTCACAGAGCATAGCCA | |
| | CATCCTCCAGGCAGACAAGAGGACGCAGGAGGCACCATTCTGTGAG | |
| | AGTATCACAGTCTGAC[C/T]CAAAGACACAGCTTCACACTGTCTG | |
| | ATGGCTTGATGGTTAATGTCACTCTGCCTTTTCCCCTTCTCAGGAC | |
| | TTTGTAACCGCTCTGTCGATTTTATTGAGAGGAACTGTCCACGAGA | |
| | AACTAAGGTGGACATTTAATTTGTATGACATCAACAAGGACGGATA | |
| | CATAAACAAAGAGGTAAGTGAGCTGGGGCCAGGGGTGT | |
| KCP_5202 | GACAAGACGACGCAGGAGGCACCATTCTGTGAGAGTATCACAGTCT | SEQ ID NO. 247 |
| | GACCCAAAGACACAGCTTCACACTGTCTGATGGCTTGATGGTTAAT | |
| | GTCACTCTGCCTTTTCCCCTTCTCAGGACTTTGTAACCGCTCTGTC | |
| | GATTTTATTGAGAGGAACTGTCCACGAGAAACTAAGGTGGACATTT | |
| | AATTTGTATGACATCA[A/C]CAAGGACGGATACATAAACAAAGAG | |
| | GTAAGTGAGCTGGGGCCAGGGGTGTGAGAGGGCTCCAGTGAAGCTA | |
| | ACTAACCCAACAGAAAACAGCCCCAGGCATGAGGATAGCACTGTCT | |
| | GAATGAGGCAGGCTCTGCTTTGGGGCTAACAGAGCTGGTCCCTGGC | |
| | AAAATAAAGAAGGCCTCCCTCATTGCCCTACCCTGCCC | |
| KCP_ela_{—} | CCACCAGGGTCCCTTCCAACTCACGGAGCCTATGGTAGTGA | SEQ ID NO. 248 |
| 249924 | ATGGCAGCCAGGTTTTTTATGGAGCAATAGCTGGACTTCAC | |
| | ATTTGCATAATGCCTTGCAGTTTCACTGTTAAGAGTACTGC | |
| | ATTGTATTCTAATTATATGAATCTCGGTCATTCCTTTATGAC | |
| | ATTTCTGAGGAATAGTATCTCAATCAAGAAAAGCCCTAATT | |
| | GCACTCCTCTCCTATCCCGGTGAGAGAGCACAGAGTCGTGC | |
| | CTGCTCGGCAGGGGTGGAGGCTGGAATTCAGTAGTCTGAGT | |
| | CGGGGATGCCTGGAGCAGGAGGTGGTCAGGGGCATTGTCC | |
| | TTTCCAAGTCAGGAAGGCAGAGAGCACCTGCTGTTGGTGCC | |
| | AAGGTTACTGGACAGGCTGCGAGGGCTGTGTGTGTCTGTCC | |
| | GATGTTCACAGGCCAGCTGCCCGGAGGCTCAGCACTCAGCC | |
| | CAGCTTCTCCGAGATGCAAACCAGGCCAGTCTGAGGCTGCC | |
| | TACAAACTTTCTGCTGAGTGCCGACAGCTGCTTCCTGCTCTG | |
| | CGGGGAGTTCTTCCAGATCCTGATCAAGGCACAGAGAATTG | |
| | ATCTATCAGATTAACCAGGAAGGAAAGAGTGGGAGAGCGA | |
| | GTGTGGGAGGCTGTGGGGCTGAGTGTTTTCTGCGTAGGAGT | |
| | CCCCTCCCTTCTGACTTGAGTATTAATTGCTACATTACCGGT | |
| | GCCATGTAAGAAAGACAGTCAGCAAAGCCTGGGAGAGCTC | |
| | CAGCTCCTCCCTCCCTGCTCTGCTCAACTTCACTCTCCTCCT | |
| | CGGTTCCGTFGGAGTACCTTGTGCCCGGGCAGTGCTGTCCC | |
| | GGCGCTGGCATCCTGAGGTGCTCCCGTGGTGAGGACTTAAG | |
| | TGGAGA[C/G]CAGGAGTGGGTGGAGAGAGGGAGGGAGAGT | |
| | TTGCCCTGCAGGCTGTGTGGATGCAGAAGCCAGACTCGGTG | |
| | CAGAGGGAGCTGTGCTGTTCCCGGAGCCTGGCTTCAGGGGT | |
| | GCATCCGTCACTCAGGGTTGATTCACGCAGGCAGGGTCCAA | |
| | GTTCCTGGGGTGCACAAGGTGGGCACTGTCCCTTGTGGGTG | |
| | CTGACAGCAGAGCCTGGCTCCCCTCCGCCACCATGAGCGGC | |
| | TGCTCCAAAAGATGCAAGCTTGGGTTCGTGAAATTTGCCCA | |
| | GACCATCTTTAAGCTCATCACTGGGACCCTCAGCAAAGGTA | |
| | TGGAAACTGGCCTTGACCCTTGCTTTCTGTCTTGATATGGCC | |
| | TGGCTGGTCGCATTGCCTCGGTGTGGTGAGCGTGAGCATTC | |
| | TGGTGCACCCAGGTCTTGGAAAAAGCTGGGGAAATTGGTG | |
| | GCTGGGATTCGAGGTTGCTGACAACCTGCGTCCTGGCTTTG | |
| | AGTAGGCGGGCACCCAGCCAGGGAAGTCAGGTGGCTGTAA | |
| | TTGCCTGGAACTTTGGAAATGGAGTTGGTGGTGTGTGGCTG | |
| | ATACGTTATGGGCGGGCAGAGGGATAGAACCCTTTCCAGA | |
| | GCATTGGAAGTGGCTTAGCGTGACTGGAGTTTCAAGAAGTT | |
| | ATCCATGGAAGGTTGTATTTTGTTGATAAAAGAGAGATTTG | |
| | ATGCAGTGGGTTGTGAGTAATTCTGCAGAACAGAGACGCTT | |
| | GAGGGGGCCAGTGGGAGGTGGTGATGGGCCGGCATCTGGT | |
| | TTGCCCTGGTGGCTTCAGAAACCGGATCAGCTCTGCACCTC | |
| | AAGTGCCAAGAGCCTCCTCTCATAGGGTTCCAGCGTCTCGT | |
| | GCTTCTGGGGCTTCATTCATCGTTCTGCTTTCTTGGATCCCT | |
| | GTCCCTCCACATTTCATGCCTA | |
| KCP_ela_{—} | CAAGGCACAGAGAATTGATCTATCAGATTAACCAGGAAGGAAAGAG | SEQ ID NO. 249 |
| 250027 | TGGGAGAGCGAGTGTGGGAGGCTGTGGGGCTGAGTGTTTTCTGCGT | |
| | AGCAGTCCCCTCCCTTCTGACTTGAGTATTAATTGCTACATTACCG | |
| | CTCCCATGTAAGAAAGACAGTCAGCAAAGCCTGGGAGAGCTCCAGC | |
| | TCCTCCCTCCCTGCTCTGCTCAACTTCACTCTCCTCCTCGGTTCCC | |
| | TTGGAGTACCTTGTGCCCCGGCAGTGCTGTCCCGGCCCTGGCATCC | |
| | TGAGGTCCTCCCGTGGTGAGGACTTAAGTGGACAGCAGGAGTGGGT | |
| | GGAGAGAGGGAGGGAGAGTTTGCCCTGCAGGCTCTCTGGATGCAGA | |
| | AGCCAGACTCGCTGCAGAGGCAGCTGTGCTGTTCCCGGAGCCTGG | |
| | [/T]TTCAGGGGTGCATCCGTCACTCAGGGTTCATTCACCCAGGCA | |
| | GGCTCCAAGTTCCTGGGGTGCACAAGGTGGGCACTGTCCCTTCTGG | |
| | GTGCTGACAGCAGAGCCTGGCTCCCCTCCGCCACCATGAGCGGCTG | |
| | CTCCAAAAGATGCAAGCTTGGGTTCGTGAAATTTGCCCAGACCATC | |
| | TTTAAGCTCATCACTGGGACCCTCAGCAAAGGTATGGAAACTGGCC | |
| | TTGACCCTTGCTTTCTGTCTTGATATGGCCTGGCTGGTCGCATTGC | |
| | CTCGGTGTGGTGAGCGTGACCATTCTGGTGCACCCAGGTCTTGGAA | |
| | AAAGCTGGGGAAATTGGTGGCTGGGATTCGAGGTTGCTGACAACCT | |
| | GCGTCCTGGCTTTGAGTAGGCGGGCACCCAGCCAGGGAACTCAGCT | |
| | GGCTGTAA | |
| KCP_ela_{—} | ACAGAGAATTGATCTATCAGATTAACCAGGAAGGAAAGAGTGGGAG | SEQ ID NO. 250 |
| 250049 | AGCGAGTGTGGGAGGCTGTGGGGCTGAGTGTTTTCTGCGTAGCAGT | |
| | CCCCTCCCTTCTGACTTGAGTATTAATTGCTACATTACCGCTGCCA | |
| | TGTAAGAAAGACAGTCAGCAAAGCCTGGGAGAGCTCCAGCTCCTCC | |
| | CTCCCTGCTCTGCTCAACTTCACTCTCCTCCTCGGTTCCCTTGGAG | |
| | TACCTTGTGCCCCGGCAGTGCTGTCCCGGCCCTGGCATCCTGAGGT | |
| | CCTCCCGTGGTGAGGACTTAAGTGGACAGCAGGAGTGGGTGGAGAG | |
| | AGGGAGGGAGAGTTTGCCCTGCAGGCTCTCTGGATGCAGAAGCCAG | |
| | ACTCGCTGCAGAGGCAGCTGTGCTGTTCCCGGAGCCTGGCTTCAGG | |
| | GGTGCATCCGTCACT[A/C]AGGGTTCATTCACCCAGGCAGGCTCC | |
| | AAGTTCCTGGGGTGCACAAGGTGGGCACTGTCCCTTCTGGGTGCTG | |
| | ACAGCAGAGCCTGGCTCCCCTCCGCCACCATGAGCGGCTGCTCCAA | |
| | AAGATGCAAGCTTGGGTTCGTGAAATTTGCCCAGACCATCTTTAAG | |
| | CTCATCACTGGGACCCTCAGCAAAGGTATGGAAACTGGCCTTGACC | |
| | CTTGCTTTCTGTCTTGATATGGCCTGGCTGGTCGCATTGCCTCGGT | |
| | GTGGTGAGCGTGACCATTCTGGTGCACCCAGGTCTTGGAAAAAGCT | |
| | GGGGAAATTGGTGGCTGGGATTCGAGGTTGCTGACAACCTGCGTCC | |
| | TGGCTTTGAGTAGGCGGGCACCCAGCCAGGGAACTCAGCTGGCTGT | |
| | AATTGCCTGGAACTTTGGAAATGGAGTTGGTG | |
| KCP_UTR1 | TGGCCCACCTTCAGGGTCATGAGGATTCATAAACCCTATTC | SEQ ID NO. 251 |
| _382206 | TGCGAAGTGGGTCCAGGAATGATCAAGGGAGCTAGGGCAG | |
| | CTCTGAGTCTCCACCAGGCGCAGCCTCGGGCTCTCAGGGCT | |
| | GAGCTTCACTTCCCTTCCCAAAGGGGCCAGGGAGAGGGGCT | |
| | GCTGATGACATGATCTCAGAGGAAGGCCAAGGCCTCGAGG | |
| | CTGCCTCTGGGCCTGGCACAGGAAGGAGGAGGAGAAAATA | |
| | GGGAGCCCAAGGAAAGATCAACCCAGCCCAGCCCAAGGAG | |
| | CCCCAGCCGCAGCCCCAGCCCCAGGTGGGCTCAAACTAATT | |
| | GAAAACAGACTGGAAAAGGCTGCTTTTGCCCTTCCTCTAGA | |
| | CTCAGCATCATCAAGACTGGAGGGACAGAGCATTTGAATC | |
| | ATCAGACGCTGGGCCAGA[C/T]GTCACCCCACGCGTTTTCTC | |
| | ATTTTATCGTCCTAAGAAGCCCAGAAGGTGCGTAAAATGGC | |
| | CTGTCCCAAACAGATGAGGACATTACCTTTCTCCTCTTCCTC | |
| | CTCCTCCTTCTTCTTCTTCTTCTTTTTGCTTCATTTTTCTTTCA | |
| | TTTTTTCCCCCAGATGTTGCATTTCAGAGAGGCTGAGCGTGT | |
| | TGACTAAGGTCACACAGCTACAAACATCAGGGACCTGCGA | |
| | AAAAGCTCTGTTCCCTGGTGACAGGTGTTCTGTGATCCTAA | |
| | CACAGCCGGAGGTGGGGACAACGTCCTTGCAGTAACAAAG | |
| | GCCCTGTTGCTCAACTCAGTGGACATCAGGCCCTGTTTTCAT | |
| | TCATTAGCAGGTCAGGGATTCCAGTGTCACCTGTGCCATGT | |
| | ATTCCAGCTGATCTACCTGCAAGCCTCTACTCCCCATTTTCC | |
| | CAGCAGCAGCCGCAGACACCAGCGAACTGG | |
| KCP_UTR1 | GGGTCATGAGGATTCATAAACCCTATTCTGCGAAGTGCCTC | SEQ ID NO. 252 |
| _382272 | CAGGAATCATCAAGGGAGCTAGGGCAGCTCTGAGTCTCCA | |
| | CCAGGCCCACCCTCCGCCTCTCAGGGCTGAGCTTCACTTCC | |
| | CTTCCCAAAGGGGCCAGGGAGAGGGGCTGCTGATGACATG | |
| | ATCTCAGAGGAAGGCCAAGGCGTCCAGGCTGCCTGTGGGCC | |
| | TGGCAGAGGAAGGAGGAGGAGAAAATAGGGAGCCCAAGG | |
| | AAAGATCAACCCAGCCCAGGCCAAGGACCCCCAGCCCCAG | |
| | CCCCAGCCCCAGCTGGGCTCAAACTAATTGAAAACAGACTG | |
| | GAAAAGGCTGCTTTTGCCCTTCCTCTAGACTCAGCATCATC | |
| | AAGACTGGAGGGACAGAGCATTTGAATCATCAGACGCTGG | |
| | GCCAGACGTCACCCCACGCGTTTTCTGATTTTATCGTCCTAA | |
| | GAAGCCCAGAAGGTGCGTAAAATGGCCTGT[A/C]CCAAACA | |
| | GATGAGGACATTACCTTTCTCCTCTTCCTCCTCCTCCTTCTT | |
| | CTTCTTCTTCTTTTTGCTTCATTTTTCTTTCATTTTTTCCCCCA | |
| | GATGTTGCATTTCAGAGAGGCTGAGCGTGTTGACTAAGGTC | |
| | ACACAGCTACAAACATCAGGGACGTGCGAAAAAGGTCTGT | |
| | TCCCTGGTGACAGGTGTTGTGTGATCCTAACACAGCCGGAG | |
| | GTGGGGACAACGTCCTTGCAGTAACAAAGGCCCTGTTGCTC | |
| | AACTCAGTGGACATCAGGCCCTGTTTTCATTCATTAGCAGG | |
| | TCAGGGATTCCAGTGTCACCTGTGCCATGTATTCCAGCTGA | |
| | TCTACCTGCAAGCCTCTACTCCCCATTTTCCCAGCAGCAGCC | |
| | GCAGACACCACCCAACTGGCAGAAATTTCAAACAAGGGGT | |
| | TCTGCCTTGCACTCCGGTGCAAGGGTTGGGCACGTGGACTC | |
| | ACAT | |
| KCP_3UTR | CACAAAACAAATCCGGGACTTTAAGCCTGATCTGCTTGACCTGAAA | SEQ ID NO. 253 |
| 2_395068 | CTCATATCTACTTCCCTGCCCTCTGAAGATCTATATGTCCTATGTC | |
| | ATCACTTCACTGTTCACACAAGGTGATACCTGGCTTCTCCAAGCAC | |
| | CTGCTACCCTGAACTTACTGCACCACTCTTTCCTTCCTAGCCTGAA | |
| | TGCAATTTGCAATGAGGAGATGATTTGATTTTCTTCAGCCCTAGAC | |
| | CTCCAGCTTCCTGAGAGCAGGTACTCTTGCCTCTTCTTGCTCATTA | |
| | TTGATCCATATATTTAGAATAGCGCCTGGCAGGTAGATGGTGCTTA | |
| | ATAAATATTCATTGAATAAATGAATGAATGAATGATCCAATGAGCC | |
| | CCAAAGCAAATAACAATAAAGGACATTTGCAGAGTGCTCTACAGAG | |
| | AGACAAGTGCTTTCCCTTT[A/G]CTTTATCTTACCCCATTCTCAC | |
| | AACAATCCCCTGACATGATTGGGTTCATGTTTCACAGATGAGGAGG | |
| | CTAACGGCCAGGTGTACATACCAGGGGACATGGGACTGGGTTCATA | |
| | TGAGCTCAGGGGTAAATGATGACACCCTTTCCCCTGCCCTGAAGGA | |
| | TCTCAGTTTGAGTATTTGTAGCACACTTAGGATGTTCTGGGCCAGG | |
| | CTGAGTGGCGGTGGATGGGGGCGGTGGAGGTGGGGTATGCAAAGCA | |
| | GGAAACTCGGCCTTTGCTTTCTAAAAGCTCCCAGTCTATTTGAGGC | |
| | CAGACTTATGCATGCAGAACATTTGGGAAATGGTACAAGACAGCAG | |
| | CAAGCATAGTGCTGAATTGCACATAATCAGGTGCCAACTGCATTCC | |
| | CTTCCTTAACTAATCT | |
| KCP_3UTR | AACTTTCTCCTCAGCAAAGAGCTCTCCTCTGTTCCCTGAATCCTGG | SEQ ID NO. 254 |
| 3_398480 | ATATCCCACTGGGTCCTCTAGTGACCCCAAGCTTCAGCCTCGCATG | |
| | CCCTCTTCTCGAACAGAGAAGGCAGGAGGGAAGCAGGGACCAGCCC | |
| | CTGCTCCATCTTCCAGGATTCCAGGCCTCCCTGGCCTGGACAAGCC | |
| | CTGAGCTGGCAGTTAGGAGAGCAGAGGTTGTGAATCTGGTGGGACC | |
| | CCCAGCAGGTCTTTCTGGCTCAGTGCCCTCATCTGTGAGCAGGGGT | |
| | TCCCCAGGAGACCACGACAGAGGCCTGGAACCCAAGTTCTAATCCC | |
| | ACATCCTGGCTGGGCAACTTCAGGCAAATTTCTAACACAAGGTAAG | |
| | CCTCAATTTCTCTCTGGGGTAATGATCAGGCACCTGCTTAATTCAC | |
| | AGGGGTTTGGTGGGCATCA[C/T]GTGGACAATGTGGTTGCACAGC | |
| | AGTGGGCAATGCAAAGGAAAGGAAGTATGTTAGTAAGTGCCCCTCC | |
| | CCTGTTGCACAAAACAGGACACATGCTGGGATTGCAGAAAAGCAAT | |
| | AAATGCTGCACAGGTGAAGAAAACTATTCAAGGACCCTGGCCAAGT | |
| | CACAGGCTACCTGTGGCCCTGAGGGGACAGCTCATGGGTTGGCATT | |
| | AGGGGAAGCAGCTCTCAAGGGGCCTGTATCCTGGGGATTCAACTCT | |
| | GTGCCTATGTGGCATTGAGCCTGTGTGAATGTGGTGACTGTCATGC | |
| | TGTTTTGCTGTGTGTGCGTCTGCATGCCTGTGTGTTTGTGTGTCTC | |
| | TCCACCTTCGTGGGGGGCAACTGTAGGTGTATTATGAGCCTTGGGT | |
| | CTGTCTGTGTGTACAATAGCAATGTCTGTGCGGACTTAAGGACCTG | |
| | CGCCCATATGTTTGTGGGACTTTC | |
| KCP_3UTR | CAGAGAAGGCAGGAGGGAAGCAGGGACCAGCCCGTGCTGG | SEQ ID NO. 255 |
| 3_398605 | ATCTTCCAGGATTCCAGGCCTCCCTGGCCTGGACAAGCCCT | |
| | GAGCTGGCAGTTAGGAGAGCAGAGGTTGTGAATCTGGTGG | |
| | GACCCCCAGCAGGTCTTTCTGGCTCAGTGGCCTCATCTGTG | |
| | AGCAGGGGTTCCCCAGGAGACCACGACAGAGGCCTGGAAC | |
| | CCAAGTTCTAATCCCACATCCTGGCTGGGCAACTTCAGGCA | |
| | AATTTCTAACACAAGGTAAGCCTCAATTTCTCTCTGGGGTA | |
| | ATGATCAGGCACCTGCTTAATTCACAGGGGTTTGGTGGGCA | |
| | TCACGTGGACAATGTGGTTGCACAGCAGTGGGCAATGCAA | |
| | AGGAAAGGAAGTATGTTAGTAAGTGCCCCTCCCCTGTTGCA | |
| | CAAAACAGGACACATGCTGGGATTGCAGAAAAGCAATAAA | |
| | TGCTGCA[C/T]AGGTGAAGAAAACTATTCAAGGACCCTGGC | |
| | CAAGTCACAGGCTACGTGTGGCCGTGAGGGGACAGGTCATG | |
| | GGTTGGCATTAGGGGAAGCAGCTCTCAAGGGGCGTGTATCC | |
| | TGGGGATTCAACTCTGTGCCTATGTGGCATTGAGCCTGTGT | |
| | GAATGTGGTGACTGTCATGCTGTTTTGCTGTGTGTGCGTCTG | |
| | CATGCCTGTGTGTTTGTGTGTGTCTCCACCTTCGTGGGGGGC | |
| | AACTGTAGGTGTATTATGAGCCTTGGGTCTGTCTGTGTGTA | |
| | CAATAGCAATGTCTGTGCGGACTTAAGGACCTGCGCCCATA | |
| | TGTTTGTGGGACTTTCTGGGCATGCATGCTTGTTTATGAGGC | |
| | CATACATCCGGGTATTCTGTGAAGTGCTAGCATGGTGTGTA | |
| | TCTGTGTGGCAGACAGAAAATGGCTGGGTGGGA | |
| KCP_elb_ | ATCTCAGCACTTTGGGAGGCCAAGGCGGGTGGATCACCTGA | SEQ ID NO. 256 |
| 399912 | GGTCAGGAGTTCAAGCCCAGCCAGCCCAACATGGCGAAAC | |
| | CCCGTCTCTATTAAAAAATACAAAAAAATTTAGCTGGGCCT | |
| | AGTGGTGGGCGCCTGTAATCCCAGCTACTCCGGAGGCTGAG | |
| | GCAGGAGAATCGCTTGAATCTGGGAGGCAGAGGTTGCAGT | |
| | GAGCAGAGATCGCACCACTGCACTCCAGCCTGGGCAACAG | |
| | AGCGAGAGTCCGTCTCAAAAAAAAAAAAAAAAGAAAAAG | |
| | AAAAATGAGAGTGTAAGGGCCCAGAGGGGCTGAGGGCTCC | |
| | TTTCTCCTCCCCAACTCCGTGTCACTAGAAGGTGGGCCGTGC | |
| | CATAGGAGGATTCTGCAGAACCCTCAAGGACCCGCGGAGG | |
| | AGGACGGCACCTTCTTCCCATGACCACCCATTTGGATGTGT | |
| | TTTTCACCCCTTTCTGGGTGGGGCAGACTTTCCCCCTCCCCA | |
| | TGAGTTCAGGCAG[G/T]GGGTTAAATAAGATTTCCCTTGAA | |
| | GTCGAATGAAATCACAATGCACCACACAGAGGGACACACA | |
| | CACACACACACGCACGCACGCACATCACACACACACAGAC | |
| | ACAGACACACACACACACAGACACATAGAGAGACACAGTC | |
| | TCGCTGGGGCGAATCTACTGCGCCCTGAACCTCACCCATCA | |
| | GCGAGGTGCCTGGCGCGGGGTCTGTCTCTTAGGGTTACATG | |
| | CTCGCGGGGCTCCCGCACATACCCGGGCAGATGAGGGTGCG | |
| | CAGGGGTGAGGGGGCAGGGCTGGGCGTCCGCCGCCCCCAC | |
| | GGTGCAGCCCTCGCCGCCGGCCCGCGCCTCCGTAGTTGGCC | |
| | GGCCGCCGGCGCCTCCGGGGCCCCCTCCGCCGGTCCGACTC | |
| | TCGCCGCGAGCGCTGGCAGCAGGGAGGAGGCAGCAGGCGG | |
| | GCGCGCTGTGGGTCCGCGCCGCGCGGTGCGGGCTCTGTTCA | |
| | TTCATGATTGGTACTCGGCCGTCCGAGACG | |
| rs102685 | AGCACTCCTGGGGCTCATTGTTAAGTTTATAAAACTCAGAG | SEQ ID NO. 257 |
| | CTGATGAGTTGTGTGCACTGTGTGGGTCTGAGTGGGCTTAT | |
| | GACTCCCCTCCAAGCCTGGCTGTAAGAATCTAAGACTTAAA | |
| | GCTGAAGGACCAAATGGGACTTTCTGTCCCATCCCCTCTCT | |
| | GCTCCATGCAAGCACCAA[C/T]GTGGATTTTTGCCCCTAATT | |
| | ATATTAGGGAACGCTGTCAATCAAAAAGATGATGTTAAACT | |
| | CATGCAGAACAAACGAAACCATGTTTAAGGGGAAGAAAAG | |
| | ATTACATCTTCAAATGCCAGCATGCCATCATTAATACAATG | |
| | TCTAATGTAGTCAATATAGTTCAGGCAACATTGAAAATGAA | |
| | CCACTGCAAATACTAGGAATACAATTTCAAGAGGAAGGAC | |
| | AACATTCTGTGTTTCTATGCACACAGTCCTGTAAATTATTTG | |
| | CAGCTCAAGTATGTCATGTTCTTTTAAATTTTCCCCTGGGTA | |
| | CAGCTTGAACAACTTCCTACAAGTGTTGATATGTCATATTCT | |
| | CATTATCATTTAGTTCAAAATTACCATGATTTAATTACCATG | |
| | AGGTTGCTTTTTTGATACATGAGTTAGTTAGAAATTGAATTA | |
| | ggctaggcatggtggcttccacctataatcctagcactttggaaggccaaggcaggaggattgctt | |
| | gagtttgaggccagtctaggcaatatagtgagacctcatctccccaaaagtacaaaaaaactagcc | |
| | aggcatggggacacatgcctatagttccagctactcaaaggctgaggtggggaggattgctttgag | |
| | cctggg | |
| rs905808 | GCCAGCTATCCCCAGAGACATCACAGGAGAAGGAGCAGAAGCTGGA | SEQ ID NO. 258 |
| | ACATCATCCGGGAGCTGGACTAGAACGTCCCGGGAAACTTCAGCCT | |
| | GGCTTCTGCTTTGTCCCGAAAACCCAGGGGCTCCAGCTCCAGGGCT | |
| | GTGTCTTAGAATGAGGCAGTTTATCTGTTCAGGGCTTCTCTTAGTT | |
| | TTTAATCCCAATAGGACACA[C/T]GTTGTATTAAAAAGCCATGCG | |
| | AGATGGAAGAAGGAAATTGAATGAAATTTGAGGGCAGGTAGGAGCA | |
| | GAGACAATAAATAATTCAGCAGTGAAGGAAGCAGAAAAAAGATTGC | |
| | ACTCATTTCGCCCTTCAACAATTATACTAAACACCTGCTCTGGGCC | |
| | ACAGAAGGGCCAGATCCCATTCCTGTGCTCAGGAAGCCCACAGGCC | |
| | GGCAGGGAGAGGCTGGTTGGAATGTGTGCTTTGCACTGTAACGGAG | |
| | GCATCGAGCATGGTAAGGGACTGGCGGTGACTGCTGCCTGCGGACG | |
| | TCGAGACAGGGGCCTTTGAAGAGGCAGGACCTGTCTGGAGTCTTAC | |
| | CTGGGCCTTGGCCTGGCAATGGGG | |

[0282] TABLE 11
The Build 33 location of SNPs and microsatellites employed for
the first-pass association analysis across KChIP1.

| | | Public | | |
|---|---|---|---|---|
| Start (B33) | Marker | Alias | deCODE alias | Variation |
| 169788696 | DG5S47 | | | |
| 169794522 | DG5S1592 | | | |
| 169843903 | DG5S119 | | | |
| 169869845 | rs933656 | rs933656 | DG00AAFCS | A/G |
| 169869955 | rs2339091 | rs2339091 | DG00AAFCI | G/T |
| 169961410 | DG5S13 | | | |
| 169964087 | rs905808 | rs905808 | SG05S1212 | C/T |
| 170006645 | rs883849 | rs883849 | SG05S206 | A/G |
| 170015858 | DG5S123 | | | |
| 170037283 | rs2135046 | rs2135046 | SG05S159 | C/T |
| 170041996 | DG5S124 | | | |
| 170056955 | rs2339139 | rs2339139 | DG00AAFCR | A/G |
| 170064881 | rs329468 | rs329468 | SG05S896 | A/G |
| 170070041 | rs50057 | rs50057 | SG05S1270 | A/G |
| 170070735 | rs102685 | rs102685 | SG05S905 | C/T |
| 170073252 | rs50364 | rs50364 | DG00AAFCD | A/G |
| 170081292 | KCP_1152 | | SG05S176 | C/T |
| 170081473 | KCP_1333 | | SG05S921 | A/G |
| 170082789 | KCP_2649 | | SG05S923 | C/T |
| 170085116 | KCP_4976 | | SG05S187 | C/T |
| 170085217 | KCP_5077 | | SG05S179 | A/T |
| 170095540 | KCP_15400 | | SG05S946 | C/T |
| 170096292 | KCP_16152 | rs4868018 | SG05S948 | A/G |
| 170098209 | KCP_18069 | rs1363712 | SG05S189 | C/T |
| 170105556 | D5S625 | | | |

[0283] TABLE 12
The Build 33 location of SNPs found through sequencing across
KChIP1(from exon 1b to exon 8).

| | | | SEQ PROJECT | | |
|---|---|---|---|---|---|
| Build 33 Pos | Project Pos | DECODE ALIAS | ALIAS | PUBLIC ALIAS | SNP |
| 169866787 | 9677 | SG05S2107 | KCP_9677 | rs6555900 | C/G |
| 169867465 | 10355 | SG05S229 | KCP_10355 | | A/T |
| 169867556 | 10446 | DG00AAHAR | KCP_10446 | | C/G |
| 169871957 | 14847 | SG05S485 | KCP_14847 | rs4867608 | A/T |
| 169872129 | 15019 | SG05S1298 | KCP_15019 | rs4867973 | A/G |
| 169872417 | 15307 | SG05S437 | KCP_15307 | | A/C |
| 169872421 | 15311 | SG05S438 | KCP_15311 | | A/T |
| 169872435 | 15325 | SG05S439 | KCP_15325 | | C/G |
| 169872949 | 15839 | SG05S440 | KCP_15839 | | A/G |
| 169873539 | 16429 | SG05S486 | KCP_16429 | | C/T |
| 169873680 | 16570 | SG05S487 | KCP_16570 | | A/G |
| 169875123 | 18013 | SG05S488 | KCP_18013 | | A/T |
| 169875568 | 18458 | SG05S1002 | KCP_18458 | rs6555901 | A/G |
| 169876302 | 19192 | SG05S489 | KCP_19192 | | A/G |
| 169878365 | 21255 | SG05S490 | KCP_21255 | | G/T |
| 169878734 | 21624 | SG05S491 | KCP_21624 | rs4867609 | A/G |
| 169879678 | 22568 | SG05S492 | KCP_22568 | | A/C |
| 169879717 | 22607 | SG05S493 | KCP_22607 | | C/T |
| 169881496 | 24386 | SG05S494 | KCP_24386 | | A/G |
| 169882681 | 25571 | SG05S495 | KCP_25571 | | A/C |
| 169883265 | 26155 | SG05S496 | KCP_26155 | rs7443451 | A/G |
| 169883333 | 26223 | SG05S497 | KCP_26223 | | C/G |
| 169883413 | 26303 | SG05S498 | KCP_26303 | | A/G |
| 169883465 | 26355 | SG05S1171 | KCP_26355 | | C/G |
| 169883518 | 26408 | SG05S499 | KCP_26408 | | A/T |
| 169883738 | 26628 | SG05S500 | KCP_26628 | | A/G |
| 169883811 | 26701 | SG05S501 | KCP_26701 | | A/G |
| 169884084 | 26974 | SG05S1172 | KCP_26974 | | C/T |
| 169884145 | 27035 | SG05S502 | KCP_27035 | | G/T |
| 169884439 | 27329 | SG05S503 | KCP_27329 | | C/T |
| 169884682 | 27572 | SG05S504 | KCP_27572 | | A/G |
| 169884707 | 27597 | DG00AAJHT | KCP_27597 | | A/G |
| 169884973 | 27863 | SG05S505 | KCP_27863 | | A/G |
| 169885005 | 27895 | SG05S506 | KCP_27895 | | A/G |
| 169888453 | 31343 | SG05S507 | KCP_31343 | rs4867975 | C/T |
| 169889433 | 32323 | SG05S60 | KCP_32323 | | C/T |
| 169889680 | 32570 | SG05S508 | KCP_32570 | | A/G |
| 169890025 | 32915 | SG05S509 | KCP_32915 | | A/G |
| 169890055 | 32945 | SG05S1173 | KCP_32945 | rs6873409 | A/G |
| 169890089 | 32979 | SG05S1174 | KCP_32979 | rs6873133 | A/C |
| 169890291 | 33181 | SG05S510 | KCP_33181 | rs6873872 | A/G |
| 169892122 | 35012 | SG05S1175 | KCP_35012 | | A/C |
| 169892332 | 35222 | SG05S511 | KCP_35222 | rs7724503 | A/G |
| 169892524 | 35414 | SG05S61 | KCP_35414 | | G/T |
| 169892619 | 35509 | SG05S512 | KCP_35509 | rs6885463 | C/T |
| 169892687 | 35577 | SG05S513 | KCP_35577 | | G/T |
| 169893157 | 36047 | SG05S514 | KCP_36047 | rs6555903 | C/T |
| 169893169 | 36059 | SG05S515 | KCP_36059 | rs6555904 | C/T |
| 169893871 | 36761 | SG05S516 | KCP_36761 | | A/C |
| 169894061 | 36951 | SG05S517 | KCP_36951 | | A/G |
| 169894358 | 37248 | SG05S518 | KCP_37248 | | C/G |
| 169895507 | 38397 | SG05S1176 | KCP_38397 | | C/T |
| 169895699 | 38589 | SG05S953 | KCP_38589 | | A/C |
| 169896322 | 39212 | SG05S519 | KCP_39212 | rs7737732 | G/T |
| 169896357 | 39247 | SG05S520 | KCP_39247 | | A/G |
| 169896369 | 39259 | SG05S521 | KCP_39259 | | A/G |
| 169896451 | 39341 | SG05S1177 | KCP_39341 | | A/G |
| 169896647 | 39537 | SG05S522 | KCP_39537 | | C/T |
| 169896750 | 39640 | SG05S523 | KCP_39640 | | A/T |
| 169896914 | 39804 | SG05S524 | KCP_39804 | | A/G |
| 169897484 | 40374 | SG05S525 | KCP_40374 | | C/T |
| 169897594 | 40484 | SG05S526 | KCP_40484 | | A/G |
| 169897621 | 40511 | SG05S527 | KCP_40511 | | C/T |
| 169897856 | 40746 | SG05S528 | KCP_40746 | | C/T |
| 169898205 | 41095 | SG05S529 | KCP_41095 | | C/T |
| 169898252 | 41142 | SG05S530 | KCP_41142 | | C/T |
| 169898371 | 41261 | SG05S531 | KCP_41261 | | A/G |
| 169899446 | 42336 | SG05S532 | KCP_42336 | | A/G |
| 169899693 | 42583 | SG05S533 | KCP_42583 | | A/G |
| 169900156 | 43046 | SG05S534 | KCP_43046 | | A/G |
| 169900425 | 43315 | SG05S1178 | KCP_43315 | | C/G |
| 169900629 | 43519 | SG05S535 | KCP_43519 | | C/T |
| 169902212 | 45102 | SG05S536 | KCP_45102 | rs2112601 | A/G |
| 169902400 | 45290 | SG05S537 | KCP_45290 | | G/T |
| 169903206 | 46096 | SG05S538 | KCP_46096 | | C/T |
| 169903615 | 46505 | SG05S539 | KCP_46505 | | C/T |
| 169903676 | 46566 | SG05S540 | KCP_46566 | | A/C |
| 169903766 | 46656 | SG05S541 | KCP_46656 | | A/C |
| 169904530 | 47420 | SG05S542 | KCP_47420 | | C/T |
| 169904757 | 47647 | SG05S543 | KCP_47647 | | A/G |
| 169906262 | 49152 | SG05S1179 | KCP_49152 | | A/G |
| 169906576 | 49466 | SG05S544 | KCP_49466 | | A/G |
| 169906846 | 49736 | SG05S545 | KCP_49736 | | A/T |
| 169907866 | 50756 | SG05S1180 | KCP_50756 | | A/G |
| 169908937 | 51827 | SG05S1181 | KCP_51827 | | C/T |
| 169909190 | 52080 | SG05S1182 | KCP_52080 | | C/T |
| 169910099 | 52989 | SG05S546 | KCP_52989 | | A/G |
| 169910133 | 53023 | SG05S547 | KCP_53023 | | C/T |
| 169911784 | 54674 | SG05S548 | KCP_54674 | | A/C |
| 169911823 | 54713 | SG05S549 | KCP_54713 | | A/C |
| 169913086 | 55976 | SG05S1183 | KCP_55976 | | A/G |
| 169913415 | 56305 | SG05S62 | KCP_56305 | | A/G |
| 169913670 | 56560 | SG05S954 | KCP_56560 | | C/T |
| 169913988 | 56878 | SG05S550 | KCP_56878 | | C/G |
| 169914731 | 57621 | SG05S551 | KCP_57621 | | A/G |
| 169914887 | 57777 | SG05S552 | KCP_57777 | | A/G |
| 169915597 | 58487 | SG05S553 | KCP_58487 | | A/G |
| 169917130 | 60020 | SG05S554 | KCP_60020 | | C/T |
| 169917579 | 60469 | SG05S555 | KCP_60469 | | A/G |
| 169917813 | 60703 | SG05S556 | KCP_60703 | | A/G |
| 169919206 | 62096 | SG05S557 | KCP_62096 | | A/G |
| 169919909 | 62799 | SG05S233 | KCP_62799 | | C/T |
| 169921008 | 63898 | SG05S558 | KCP_63898 | | A/G |
| 169921407 | 64297 | SG05S559 | KCP_64297 | | A/G |
| 169921917 | 64807 | SG05S560 | KCP_64807 | | G/T |
| 169922010 | 64900 | SG05S1184 | KCP_64900 | | A/G |
| 169922309 | 65199 | SG05S955 | KCP_65199 | | A/G |
| 169922397 | 65287 | SG05S561 | KCP_65287 | | G/T |
| 169923449 | 66339 | SG05S562 | KCP_66339 | | A/G |
| 169923611 | 66501 | SG05S563 | KCP_66501 | | A/G |
| 169924005 | 66895 | SG05S564 | KCP_66895 | | A/G |
| 169925422 | 68312 | SG05S956 | KCP_68312 | | A/C |
| 169926039 | 68929 | SG05S565 | KCP_68929 | | C/T |
| 169926454 | 69344 | SG05S566 | KCP_69344 | | A/G |
| 169926756 | 69646 | SG05S567 | KCP_69646 | | C/T |
| 169927013 | 69903 | SG05S568 | KCP_69903 | | A/G |
| 169927893 | 70783 | SG05S569 | KCP_70783 | | C/T |
| 169928063 | 70953 | SG05S570 | KCP_70953 | | A/T |
| 169928076 | 70966 | SG05S571 | KCP_70966 | | A/C |
| 169928444 | 71334 | SG05S572 | KCP_71334 | | C/T |
| 169928522 | 71412 | SG05S573 | KCP_71412 | | A/T |
| 169928555 | 71445 | SG05S1185 | KCP_71445 | | C/T |
| 169928665 | 71555 | SG05S1186 | KCP_71555 | | C/T |
| 169928700 | 71590 | SG05S1187 | KCP_71590 | | C/T |
| 169929635 | 72525 | SG05S574 | KCP_72525 | rs4269297 | A/G |
| 169929849 | 72739 | SG05S575 | KCP_72739 | | C/G |
| 169930171 | 73061 | SG05S576 | KCP_73061 | rs4867613 | C/T |
| 169930506 | 73396 | SG05S577 | KCP_73396 | | A/T |
| 169930538 | 73428 | SG05S578 | KCP_73428 | rs4867978 | A/G |
| 169930644 | 73534 | SG05S579 | KCP_73534 | rs4867979 | C/T |
| 169931073 | 73963 | SG05S580 | KCP_73963 | | C/G |
| 169931425 | 74315 | SG05S581 | KCP_74315 | | A/G |
| 169931663 | 74553 | SG05S582 | KCP_74553 | | G/T |
| 169931670 | 74560 | SG05S583 | KCP_74560 | | C/T |
| 169932137 | 75027 | SG05S584 | KCP_75027 | | C/T |
| 169932696 | 75586 | SG05S585 | KCP_75586 | rs7723669 | A/C |
| 169932998 | 75888 | SG05S586 | KCP_75888 | | C/T |
| 169933181 | 76071 | SG05S587 | KCP_76071 | rs386758 | A/G |
| 169933212 | 76102 | SG05S588 | KCP_76102 | rs386759 | C/T |
| 169933256 | 76146 | SG05S589 | KCP_76146 | | A/G |
| 169933389 | 76279 | SG05S1188 | KCP_76279 | rs4368746 | C/T |
| 169933420 | 76310 | SG05S590 | KCP_76310 | | C/T |
| 169933699 | 76589 | SG05S591 | KCP_76589 | | C/T |
| 169933756 | 76646 | SG05S592 | KCP_76646 | | C/T |
| 169934348 | 77238 | SG05S593 | KCP_77238 | | G/T |
| 169934429 | 77319 | SG05S594 | KCP_77319 | | C/G |
| 169934556 | 77446 | SG05S595 | KCP_77446 | | C/T |
| 169934663 | 77553 | SG05S596 | KCP_77553 | | C/T |
| 169934751 | 77641 | SG05S597 | KCP_77641 | rs4242157 | A/G |
| 169934936 | 77826 | SG05S598 | KCP_77826 | | C/G |
| 169934949 | 77839 | SG05S599 | KCP_77839 | rs7735198 | A/G |
| 169935134 | 78024 | SG05S600 | KCP_78024 | rs4867981 | A/G |
| 169935240 | 78130 | SG05S601 | KCP_78130 | rs4867614 | C/T |
| 169935254 | 78144 | SG05S602 | KCP_78144 | | A/C |
| 169935713 | 78603 | SG05S603 | KCP_78603 | | C/T |
| 169935892 | 78782 | SG05S604 | KCP_78782 | | A/G |
| 169935939 | 78829 | SG05S605 | KCP_78829 | | A/G |
| 169935989 | 78879 | SG05S606 | KCP_78879 | | C/T |
| 169936272 | 79162 | SG05S607 | KCP_79162 | | C/T |
| 169936275 | 79165 | SG05S608 | KCP_79165 | | C/T |
| 169936329 | 79219 | SG05S609 | KCP_79219 | | G/T |
| 169936495 | 79385 | SG05S610 | KCP_79385 | rs6876518 | C/T |
| 169936910 | 79800 | SG05S611 | KCP_79800 | | C/G |
| 169937029 | 79919 | SG05S1189 | KCP_79919 | | A/G |
| 169937270 | 80160 | SG05S612 | KCP_80160 | | A/G |
| 169937896 | 80786 | SG05S613 | KCP_80786 | | A/G |
| 169938126 | 81016 | SG05S614 | KCP_81016 | | C/T |
| 169938400 | 81290 | SG05S615 | KCP_81290 | | A/G |
| 169938894 | 81784 | SG05S1190 | KCP_81784 | | A/G |
| 169939578 | 82468 | SG05S957 | KCP_82468 | rs4242158 | A/G |
| 169940311 | 83201 | SG05S616 | KCP_83201 | | C/T |
| 169940995 | 83885 | SG05S617 | KCP_83885 | | A/G |
| 169941106 | 83996 | SG05S618 | KCP_83996 | rs4867615 | A/G |
| 169941897 | 84787 | SG05S1191 | KCP_84787 | | A/T |
| 169942667 | 85557 | SG05S619 | KCP_85557 | | A/G |
| 169942775 | 85665 | SG05S620 | KCP_85665 | rs6892193 | C/T |
| 169942903 | 85793 | SG05S958 | KCP_85793 | rs6892514 | C/T |
| 169943046 | 85936 | SG05S621 | KCP_85936 | | A/G |
| 169943817 | 86707 | SG05S622 | KCP_86707 | | A/T |
| 169944237 | 87127 | SG05S623 | KCP_87127 | rs6881347 | C/G |
| 169945487 | 88377 | SG05S624 | KCP_88377 | | C/T |
| 169945857 | 88747 | SG05S625 | KCP_88747 | | A/T |
| 169945886 | 88776 | SG05S626 | KCP_88776 | | C/T |
| 169945923 | 88813 | SG05S627 | KCP_88813 | | A/G |
| 169946380 | 89270 | SG05S628 | KCP_89270 | | A/G |
| 169946491 | 89381 | SG05S629 | KCP_89381 | rs4867983 | A/G |
| 169947228 | 90118 | SG05S630 | KCP_90118 | | A/G |
| 169947236 | 90126 | SG05S631 | KCP_90126 | | G/T |
| 169947285 | 90175 | SG05S632 | KCP_90175 | | C/T |
| 169947471 | 90361 | SG05S633 | KCP_90361 | | C/G |
| 169947529 | 90419 | SG05S634 | KCP_90419 | | C/T |
| 169947661 | 90551 | SG05S635 | KCP_90551 | | A/G |
| 169947834 | 90724 | SG05S636 | KCP_90724 | | A/G |
| 169948187 | 91077 | SG05S637 | KCP_91077 | rs6874152 | A/G |
| 169948683 | 91573 | SG05S1192 | KCP_91573 | | A/G |
| 169948703 | 91593 | SG05S1193 | KCP_91593 | | G/T |
| 169948722 | 91612 | SG05S1194 | KCP_91612 | | A/G |
| 169948755 | 91645 | SG05S1195 | KCP_91645 | | C/T |
| 169948788 | 91678 | SG05S1196 | KCP_91678 | | A/G |
| 169948798 | 91688 | SG05S1197 | KCP_91688 | | C/T |
| 169948977 | 91867 | SG05S638 | KCP_91867 | | C/T |
| 169949063 | 91953 | SG05S639 | KCP_91953 | | C/T |
| 169949229 | 92119 | SG05S640 | KCP_92119 | | C/T |
| 169949277 | 92167 | SG05S641 | KCP_92167 | | A/T |
| 169949352 | 92242 | SG05S642 | KCP_92242 | | A/G |
| 169949354 | 92244 | SG05S643 | KCP_92244 | rs4867984 | A/G |
| 169949449 | 92339 | SG05S644 | KCP_92339 | | C/T |
| 169950146 | 93036 | SG05S63 | KCP_93036 | | A/G |
| 169950148 | 93038 | SG05S645 | KCP_93038 | | A/G |
| 169950333 | 93223 | SG05S646 | KCP_93223 | rs4867985 | C/T |
| 169950655 | 93545 | SG05S64 | KCP_93545 | | G/T |
| 169950703 | 93593 | SG05S1198 | KCP_93593 | | C/G |
| 169950754 | 93644 | SG05S654 | KCP_93644 | | G/T |
| 169950844 | 93734 | SG05S655 | KCP_93734 | | C/T |
| 169950855 | 93745 | SG05S656 | KCP_93745 | | G/T |
| 169950892 | 93782 | SG05S1199 | KCP_93782 | | C/G |
| 169950990 | 93880 | SG05S657 | KCP_93880 | | C/T |
| 169951245 | 94135 | SG05S1200 | KCP_94135 | | A/C |
| 169951290 | 94180 | SG05S1201 | KCP_94180 | | A/G |
| 169951422 | 94312 | SG05S658 | KCP_94312 | | A/T |
| 169951577 | 94467 | SG05S659 | KCP_94467 | | A/G |
| 169951689 | 94579 | SG05S660 | KCP_94579 | | A/G |
| 169951702 | 94592 | SG05S661 | KCP_94592 | | A/G |
| 169951831 | 94721 | SG05S662 | KCP_94721 | | C/G |
| 169951838 | 94728 | SG05S663 | KCP_94728 | | A/G |
| 169951848 | 94738 | SG05S664 | KCP_94738 | | C/T |
| 169951855 | 94745 | SG05S665 | KCP_94745 | | A/G |
| 169952144 | 95034 | SG05S1202 | KCP_95034 | | A/G |
| 169952209 | 95099 | SG05S666 | KCP_95099 | | A/C |
| 169952705 | 95595 | SG05S667 | KCP_95595 | | A/G |
| 169952838 | 95728 | SG05S670 | KCP_95728 | | A/G |
| 169952962 | 95852 | SG05S671 | KCP_95852 | | A/G |
| 169953175 | 96065 | SG05S672 | KCP_96065 | | C/G |
| 169953185 | 96075 | SG05S673 | KCP_96075 | rs4354060 | A/G |
| 169953207 | 96097 | SG05S674 | KCP_96097 | rs4374772 | C/G |
| 169953297 | 96187 | SG05S675 | KCP_96187 | | A/G |
| 169953327 | 96217 | SG05S676 | KCP_96217 | | A/G |
| 169953334 | 96224 | SG05S677 | KCP_96224 | | A/G |
| 169953426 | 96316 | SG05S678 | KCP_96316 | rs6862741 | A/G |
| 169953728 | 96618 | SG05S1203 | KCP_96618 | | C/G |
| 169953902 | 96792 | SG05S679 | KCP_96792 | rs4867987 | C/T |
| 169954134 | 97024 | SG05S680 | KCP_97024 | rs4867988 | C/T |
| 169954165 | 97055 | SG05S1204 | KCP_97055 | rs4867989 | C/T |
| 169954260 | 97150 | SG05S1205 | KCP_97150 | | A/G |
| 169954800 | 97690 | SG05S681 | KCP_97690 | rs6868698 | A/T |
| 169954954 | 97844 | DG00AAJIA | KCP_97844 | rs2202438 | A/T |
| 169955450 | 98340 | SG05S682 | KCP_98340 | | C/T |
| 169956638 | 99528 | SG05S683 | KCP_99528 | | A/C |
| 169956932 | 99822 | SG05S684 | KCP_99822 | | C/T |
| 169957089 | 99979 | SG05S685 | KCP_99979 | | A/G |
| 169957538 | 100428 | SG05S1206 | KCP_100428 | | G/T |
| 169958211 | 101101 | SG05S1207 | KCP_101101 | rs4495201 | A/G |
| 169958651 | 101541 | SG05S1208 | KCP_101541 | | A/G |
| 169958784 | 101674 | SG05S686 | KCP_101674 | | A/C |
| 169959085 | 101975 | SG05S687 | KCP_101975 | | A/G |
| 169959172 | 102062 | SG05S1209 | KCP_102062 | | A/T |
| 169959537 | 102427 | SG05S688 | KCP_102427 | | A/G |
| 169959561 | 102451 | SG05S1210 | KCP_102451 | | C/T |
| 169959860 | 102750 | SG05S1211 | KCP_102750 | | C/T |
| 169959992 | 102882 | DG00AAJIB | KCP_102882 | | C/T |
| 169961135 | 104025 | SG05S689 | KCP_104025 | rs4867990 | A/G |
| 169961268 | 104158 | SG05S690 | KCP_104158 | | G/T |
| 169961404 | 104294 | SG05S691 | KCP_104294 | rs4867991 | A/G |
| 169961971 | 104861 | SG05S692 | KCP_104861 | | A/G |
| 169962144 | 105034 | SG05S693 | KCP_105034 | | A/G |
| 169962410 | 105300 | SG05S694 | KCP_105300 | rs4242159 | A/T |
| 169962429 | 105319 | SG05S695 | KCP_105319 | rs4428429 | C/G |
| 169962889 | 105779 | SG05S696 | KCP_105779 | | A/G |
| 169962929 | 105819 | SG05S697 | KCP_105819 | | C/T |
| 169963467 | 106357 | SG05S698 | KCP_106357 | rs4867990 | A/G |
| 169963592 | 106482 | SG05S699 | KCP_106482 | | C/T |
| 169963741 | 106631 | SG05S700 | KCP_106631 | | A/G |
| 169963761 | 106651 | SG05S701 | KCP_106651 | | A/G |
| 169963827 | 106717 | SG05S702 | KCP_106717 | | A/T |
| 169964021 | 106911 | SG05S703 | KCP_106911 | rs905807 | C/G |
| 169964087 | 106977 | SG05S1212 | KCP_106977 | rs905808 | C/T |
| 169964112 | 107002 | SG05S1213 | KCP_107002 | rs905809 | C/T |
| 169964368 | 107258 | SG05S988 | KCP_107258 | rs905811 | A/G |
| 169964490 | 107380 | DG00AAJIC | KCP_107380 | | A/G |
| 169964862 | 107752 | SG05S705 | KCP_107752 | rs905812 | A/T |
| 169964998 | 107888 | SG05S706 | KCP_107888 | | A/T |
| 169965204 | 108094 | SG05S707 | KCP_108094 | | C/T |
| 169965210 | 108100 | SG05S708 | KCP_108100 | | C/T |
| 169965293 | 108183 | SG05S709 | KCP_108183 | | C/T |
| 169965384 | 108274 | SG05S710 | KCP_108274 | | C/T |
| 169965778 | 108668 | SG05S1214 | KCP_108668 | | C/T |
| 169965813 | 108703 | SG05S230 | KCP_108703 | | G/T |
| 169965814 | 108704 | SG05S711 | KCP_108704 | | A/G |
| 169965989 | 108879 | SG05S712 | KCP_108879 | | A/T |
| 169966345 | 109235 | SG05S713 | KCP_109235 | | C/G |
| 169966790 | 109680 | SG05S714 | KCP_109680 | | A/C |
| 169966813 | 109703 | SG05S715 | KCP_109703 | rs6877169 | A/G |
| 169966833 | 109723 | SG05S716 | KCP_109723 | | A/G |
| 169966856 | 109746 | SG05S718 | KCP_109746 | rs905813 | A/G |
| 169967196 | 110086 | SG05S719 | KCP_110086 | | C/T |
| 169967509 | 110399 | SG05S720 | KCP_110399 | | C/G |
| 169968134 | 111024 | SG05S721 | KCP_111024 | | A/C |
| 169968258 | 111148 | SG05S722 | KCP_111148 | rs7726675 | C/T |
| 169968588 | 111478 | SG05S723 | KCP_111478 | rs2089191 | C/G |
| 169968602 | 111492 | SG05S724 | KCP_111492 | | A/G |
| 169968614 | 111504 | SG05S725 | KCP_111504 | | C/G |
| 169969010 | 111900 | SG05S726 | KCP_111900 | | A/G |
| 169969185 | 112075 | SG05S727 | KCP_112075 | | A/G |
| 169969769 | 112659 | SG05S728 | KCP_112659 | rs4867994 | C/T |
| 169970341 | 113231 | SG05S729 | KCP_113231 | | A/G |
| 169970367 | 113257 | SG05S730 | KCP_113257 | rs4867616 | A/G |
| 169970440 | 113330 | SG05S733 | KCP_113330 | | A/G |
| 169971048 | 113938 | SG05S734 | KCP_113938 | | A/G |
| 169971464 | 114354 | SG05S736 | KCP_114354 | | A/G |
| 169971531 | 114421 | SG05S1215 | KCP_114421 | | C/T |
| 169971568 | 114458 | SG05S737 | KCP_114458 | rs2879337 | C/T |
| 169971621 | 114511 | SG05S738 | KCP_114511 | | C/T |
| 169972209 | 115099 | SG05S740 | KCP_115099 | rs1553537 | A/G |
| 169972598 | 115488 | SG05S741 | KCP_115488 | rs6870612 | C/G |
| 169973254 | 116144 | SG05S742 | KCP_116144 | rs1013922 | C/T |
| 169973325 | 116215 | SG05S743 | KCP_116215 | | A/G |
| 169973369 | 116259 | SG05S744 | KCP_116259 | | A/G |
| 169973465 | 116355 | SG05S745 | KCP_116355 | rs2089192 | A/G |
| 169974479 | 117369 | SG05S746 | KCP_117369 | rs870109 | A/T |
| 169974926 | 117816 | SG05S747 | KCP_117816 | rs1553538 | C/T |
| 169976065 | 118955 | SG05S1216 | KCP_118955 | | C/T |
| 169977940 | 120830 | SG05S748 | KCP_120830 | rs905819 | C/T |
| 169978197 | 121087 | SG05S749 | KCP_121087 | | C/T |
| 169978247 | 121137 | SG05S192 | KCP_121137 | | A/G |
| 169978339 | 121229 | SG05S193 | KCP_121229 | | C/T |
| 169978427 | 121317 | SG05S1217 | KCP_121317 | | C/T |
| 169980304 | 123194 | SG05S751 | KCP_123194 | | A/G |
| 169980403 | 123293 | SG05S752 | KCP_123293 | | A/G |
| 169980481 | 123371 | SG05S1218 | KCP_123371 | | A/G |
| 169980664 | 123554 | SG05S753 | KCP_123554 | | C/T |
| 169981035 | 123925 | SG05S1219 | KCP_123925 | | A/G |
| 169981067 | 123957 | SG05S754 | KCP_123957 | | A/G |
| 169981628 | 124518 | SG05S755 | KCP_124518 | | C/T |
| 169981632 | 124522 | SG05S756 | KCP_124522 | | G/T |
| 169981987 | 124877 | SG05S194 | KCP_124877 | rs4146511 | C/T |
| 169982473 | 125363 | SG05S757 | KCP_125363 | rs2202436 | A/T |
| 169982868 | 125758 | SG05S758 | KCP_125758 | | C/T |
| 169983196 | 126086 | SG05S195 | KCP_126086 | rs2202437 | A/G |
| 169983318 | 126208 | DG00AAJHA | KCP_126208 | | T/C |
| 169983565 | 126455 | SG05S1220 | KCP_126455 | | C/G |
| 169983591 | 126481 | SG05S759 | KCP_126481 | rs2221441 | C/G |
| 169983692 | 126582 | SG05S760 | KCP_126582 | | A/G |
| 169985824 | 128714 | SG05S1221 | KCP_128714 | | A/G |
| 169985916 | 128806 | SG05S151 | KCP_128806 | | A/G |
| 169985985 | 128875 | SG05S761 | KCP_128875 | | C/T |
| 169986162 | 129052 | SG05S763 | KCP_129052 | rs4867617 | C/G |
| 169986174 | 129064 | SG05S762 | KCP_129064 | | C/G |
| 169986189 | 129079 | SG05S764 | KCP_129079 | rs4867618 | C/T |
| 169986203 | 129093 | SG05S152 | KCP_129093 | rs4867995 | C/G |
| 169986237 | 129127 | SG05S480 | KCP_129127 | rs4867619 | A/G |
| 169986334 | 129224 | SG05S765 | KCP_129224 | rs486762 | G/T |
| 169986478 | 129368 | SG05S766 | KCP_129368 | | C/G |
| 169986579 | 129469 | SG05S181 | KCP_129469 | | A/G |
| 169986800 | 129690 | SG05S182 | KCP_129690 | rs4867996 | G/T |
| 169986957 | 129847 | SG05S767 | KCP_129847 | rs4867997 | A/G |
| 169986984 | 129874 | SG05S985 | KCP_129874 | rs4867998 | A/C |
| 169986999 | 129889 | SG05S986 | KCP_129889 | rs4867999 | A/G |
| 169987419 | 130309 | DG00AAJHB | KCP_130309 | | A/G |
| 169987667 | 130557 | SG05S196 | KCP_130557 | rs905822 | C/G |
| 169988155 | 131045 | SG05S768 | KCP_131045 | | A/G |
| 169988354 | 131244 | SG05S197 | KCP_131244 | rs905824 | A/G |
| 169988368 | 131258 | SG05S769 | KCP_131258 | rs905825 | C/T |
| 169988581 | 131471 | SG05S770 | KCP_131471 | rs905826 | A/G |
| 169988714 | 131604 | SG05S1222 | KCP_131604 | | A/G |
| 169988812 | 131702 | SG05S771 | KCP_131702 | rs905827 | C/T |
| 169988905 | 131795 | SG05S65 | KCP_131795 | rs4868001 | C/T |
| 169988964 | 131854 | SG05S153 | KCP_131854 | rs6861734 | G/T |
| 169989037 | 131927 | SG05S772 | KCP_131927 | rs6865908 | A/G |
| 169989257 | 132147 | SG05S773 | KCP_132147 | | C/T |
| 169989533 | 132423 | SG05S774 | KCP_132423 | | A/G |
| 169989704 | 132594 | SG05S775 | KCP_132594 | rs4868002 | G/T |
| 169989739 | 132629 | SG05S776 | KCP_132629 | | A/G |
| 169989787 | 132677 | SG05S154 | KCP_132677 | | A/G |
| 169990284 | 133174 | SG05S777 | KCP_133174 | | C/T |
| 169990366 | 133256 | SG05S1223 | KCP_133256 | | A/G |
| 169990548 | 133438 | SG05S778 | KCP_133438 | rs4867621 | A/G |
| 169990840 | 133730 | SG05S779 | KCP_133730 | | C/T |
| 169990962 | 133852 | SG05S780 | KCP_133852 | | A/G |
| 169991155 | 134045 | SG05S198 | KCP_134045 | | C/T |
| 169991415 | 134305 | SG05S199 | KCP_134305 | rs7737768 | C/T |
| 169991521 | 134411 | SG05S781 | KCP_134411 | rs6555907 | C/T |
| 169991729 | 134619 | SG05S1224 | KCP_134619 | | A/C |
| 169991939 | 134829 | SG05S782 | KCP_134829 | | C/T |
| 169992076 | 134966 | SG05S783 | KCP_134966 | | A/G |
| 169992155 | 135045 | SG05S784 | KCP_135045 | | A/G |
| 169992628 | 135518 | SG05S200 | KCP_135518 | rs4868003 | G/T |
| 169992821 | 135711 | SG05S785 | KCP_135711 | | G/T |
| 169993032 | 135922 | SG05S786 | KCP_135922 | | A/G |
| 169993096 | 135986 | SG05S183 | KCP_135986 | | A/G |
| 169993146 | 136036 | SG05S481 | KCP_136036 | | A/C |
| 169993585 | 136475 | SG05S787 | KCP_136475 | | C/T |
| 169994082 | 136972 | SG05S201 | KCP_136972 | rs4868004 | A/G |
| 169994770 | 137660 | SG05S202 | KCP_137660 | | A/G |
| 169995924 | 138814 | SG05S788 | KCP_138814 | | C/T |
| 169997343 | 140233 | SG05S789 | KCP_140233 | | C/T |
| 169997640 | 140530 | SG05S1225 | KCP_140530 | | A/G |
| 169998201 | 141091 | SG05S1226 | KCP_141091 | | A/G |
| 170000256 | 143146 | SG05S1227 | KCP_143146 | rs953601 | C/T |
| 170000611 | 143501 | SG05S1228 | KCP_143501 | | C/T |
| 170000722 | 143612 | SG05S66 | KCP_143612 | rs4867622 | A/G |
| 170000869 | 143759 | SG05S790 | KCP_143759 | | C/T |
| 170000983 | 143873 | SG05S1229 | KCP_143873 | | C/T |
| 170001571 | 144461 | SG05S1230 | KCP_144461 | | C/T |
| 170001578 | 144468 | SG05S1299 | KCP_144468 | rs931805 | C/T |
| 170002070 | 144960 | SG05S203 | KCP_144960 | rs2279873 | C/T |
| 170002435 | 145325 | SG05S791 | KCP_145325 | rs6891256 | C/T |
| 170002801 | 145691 | SG05S1231 | KCP_145691 | | A/G |
| 170003438 | 146328 | SG05S792 | KCP_146328 | | A/G |
| 170003572 | 146462 | SG05S793 | KCP_146462 | | G/T |
| 170003856 | 146746 | SG05S482 | KCP_146746 | | C/T |
| 170003940 | 146830 | SG05S1232 | KCP_146830 | | C/T |
| 170004075 | 146965 | SG05S794 | KCP_146965 | | C/T |
| 170004199 | 147089 | SG05S1233 | KCP_147089 | | C/G |
| 170004733 | 147623 | SG05S204 | KCP_147623 | rs2292146 | C/T |
| 170005151 | 148041 | SG05S795 | KCP_148041 | | C/T |
| 170006326 | 149216 | SG05S205 | KCP_149216 | rs6555908 | A/G |
| 170006485 | 149375 | SG05S796 | KCP_149375 | rs883848 | G/T |
| 170006645 | 149535 | SG05S206 | KCP_149535 | rs883849 | A/G |
| 170006910 | 149800 | SG05S1234 | KCP_149800 | | A/G |
| 170007023 | 149913 | SG05S797 | KCP_149913 | rs4867623 | C/T |
| 170007516 | 150406 | SG05S798 | KCP_150406 | rs4868005 | G/T |
| 170007640 | 150530 | SG05S987 | KCP_150530 | | C/T |
| 170007808 | 150698 | SG05S799 | KCP_150698 | | G/T |
| 170007921 | 150811 | SG05S155 | KCP_150811 | | A/G |
| 170008215 | 151105 | SG05S800 | KCP_151105 | | G/T |
| 170008937 | 151827 | SG05S801 | KCP_151827 | rs2339094 | A/G |
| 170009218 | 152108 | SG05S1235 | KCP_152108 | | A/G |
| 170009587 | 152477 | SG05S802 | KCP_152477 | | C/T |
| 170009592 | 152482 | SG05S803 | KCP_152482 | | A/C |
| 170010385 | 153275 | SG05S1236 | KCP_153275 | rs6866371 | C/T |
| 170010518 | 153408 | SG05S1237 | KCP_153408 | | C/T |
| 170010943 | 153833 | SG05S804 | KCP_153833 | | C/T |
| 170011041 | 153931 | DG00AAJHC | KCP_153931 | rs2879338 | A/G |
| 170011269 | 154159 | SG05S805 | KCP_154159 | | A/G |
| 170011475 | 154365 | SG05S1238 | KCP_154365 | | A/G |
| 170011963 | 154853 | SG05S806 | KCP_154853 | | C/T |
| 170012367 | 155257 | SG05S807 | KCP_155257 | | C/G |
| 170013726 | 156616 | SG05S808 | KCP_156616 | | C/T |
| 170013842 | 156732 | SG05S207 | KCP_156732 | rs924876 | A/T |
| 170015154 | 158044 | SG05S809 | KCP_158044 | | A/G |
| 170015582 | 158472 | SG05S810 | KCP_158472 | | C/T |
| 170015603 | 158493 | SG05S811 | KCP_158493 | | A/G |
| 170015680 | 158570 | SG05S812 | KCP_158570 | | C/T |
| 170015727 | 158617 | SG05S67 | KCP_158617 | rs2036559 | C/T |
| 170016200 | 159090 | SG05S813 | KCP_159090 | rs6889236 | A/G |
| 170016255 | 159145 | SG05S814 | KCP_159145 | | A/G |
| 170016259 | 159149 | SG05S815 | KCP_159149 | | C/T |
| 170016791 | 159681 | SG05S1239 | KCP_159681 | | A/G |
| 170016798 | 159688 | SG05S1240 | KCP_159688 | | A/G |
| 170017255 | 160145 | SG05S208 | KCP_160145 | | A/G |
| 170017524 | 160414 | SG05S816 | KCP_160414 | | G/T |
| 170018297 | 161187 | SG05S817 | KCP_161187 | | A/G |
| 170018356 | 161246 | SG05S818 | KCP_161246 | | C/G |
| 170018549 | 161439 | SG05S819 | KCP_161439 | | A/G |
| 170018573 | 161463 | SG05S820 | KCP_161463 | | C/T |
| 170019258 | 162148 | SG05S821 | KCP_162148 | | C/T |
| 170019314 | 162204 | SG05S1241 | KCP_162204 | | A/C |
| 170019379 | 162269 | SG05S822 | KCP_162269 | | A/T |
| 170019414 | 162304 | SG05S823 | KCP_162304 | | C/G |
| 170019958 | 162848 | SG05S824 | KCP_162848 | | C/G |
| 170020197 | 163087 | SG05S825 | KCP_163087 | rs6871693 | C/G |
| 170020606 | 163496 | SG05S826 | KCP_163496 | | A/G |
| 170020870 | 163760 | SG05S827 | KCP_163760 | | A/G |
| 170021444 | 164334 | SG05S1242 | KCP_164334 | | A/G |
| 170022007 | 164897 | SG05S209 | KCP_164897 | | A/G |
| 170022125 | 165015 | SG05S828 | KCP_165015 | | G/T |
| 170022343 | 165233 | SG05S1243 | KCP_165233 | | C/T |
| 170022545 | 165435 | SG05S1244 | KCP_165435 | | C/T |
| 170023275 | 166165 | SG05S829 | KCP_166165 | | A/G |
| 170024034 | 166924 | SG05S1245 | KCP_166924 | rs4867624 | C/T |
| 170024668 | 167558 | SG05S830 | KCP_167558 | | A/G |
| 170025753 | 168643 | SG05S1246 | KCP_168643 | | A/G |
| 170025970 | 168860 | SG05S1247 | KCP_168860 | rs2202439 | C/G |
| 170026021 | 168911 | SG05S1248 | KCP_168911 | | A/G |
| 170026162 | 169052 | SG05S1249 | KCP_169052 | | A/G |
| 170026344 | 169234 | SG05S156 | KCP_169234 | | A/G |
| 170028032 | 170922 | SG05S1297 | KCP_170922 | rs4868008 | A/C |
| 170028055 | 170945 | SG05S831 | KCP_170945 | | C/G |
| 170028163 | 171053 | SG05S1250 | KCP_171053 | rs4868009 | A/G |
| 170028303 | 171193 | SG05S1300 | KCP_171193 | rs4868010 | G/T |
| 170028752 | 171642 | SG05S1251 | KCP_171642 | | G/T |
| 170028987 | 171877 | SG05S832 | KCP_171877 | | A/G |
| 170030482 | 173372 | SG05S833 | KCP_173372 | | A/G |
| 170030815 | 173705 | SG05S834 | KCP_173705 | | C/T |
| 170030958 | 173848 | SG05S210 | KCP_173848 | | A/G |
| 170030986 | 173876 | SG05S1252 | KCP_173876 | | C/T |
| 170031092 | 173982 | SG05S157 | KCP_173982 | rs6875696 | A/C |
| 170031149 | 174039 | SG05S835 | KCP_174039 | | C/T |
| 170031150 | 174040 | SG05S836 | KCP_174040 | | A/G |
| 170031353 | 174243 | DG00AAJHF | KCP_174243 | | A/G |
| 170031709 | 174599 | SG05S837 | KCP_174599 | | C/T |
| 170031812 | 174702 | SG05S838 | KCP_174702 | | C/T |
| 170031962 | 174852 | SG05S839 | KCP_174852 | | A/G |
| 170031972 | 174862 | SG05S840 | KCP_174862 | rs4628005 | G/T |
| 170032216 | 175106 | SG05S158 | KCP_175106 | rs2339095 | C/G |
| 170032280 | 175170 | SG05S211 | KCP_175170 | rs6555910 | A/G |
| 170032361 | 175251 | SG05S841 | KCP_175251 | | C/T |
| 170032362 | 175252 | DG00AAJHG | KCP_175252 | rs7721722 | A/G |
| 170032610 | 175500 | SG05S842 | KCP_175500 | | A/G |
| 170032814 | 175704 | SG05S843 | KCP_175704 | | A/G |
| 170033021 | 175911 | SG05S844 | KCP_175911 | | A/G |
| 170033923 | 176813 | SG05S845 | KCP_176813 | | A/G |
| 170033946 | 176836 | DG00AAJHH | KCP_176836 | | A/G |
| 170034620 | 177510 | SG05S184 | KCP_177510 | rs4868011 | A/C |
| 170034720 | 177610 | SG05S1253 | KCP_177610 | | G/T |
| 170034980 | 177870 | SG05S846 | KCP_177870 | | G/T |
| 170035009 | 177899 | SG05S847 | KCP_177899 | rs4868012 | C/T |
| 170036929 | 179819 | SG05S848 | KCP_179819 | | C/T |
| 170037010 | 179900 | SG05S1254 | KCP_179900 | | G/T |
| 170037283 | 180173 | SG05S159 | KCP_180173 | rs2135046 | C/T |
| 170037347 | 180237 | SG05S212 | KCP_180237 | rs2135047 | C/G |
| 170038967 | 181857 | SG05S1255 | KCP_181857 | | C/T |
| 170039237 | 182127 | SG05S1256 | KCP_182127 | | C/T |
| 170039419 | 182309 | SG05S849 | KCP_182309 | | A/T |
| 170041190 | 184080 | SG05S160 | KCP_184080 | rs2292147 | C/G |
| 170041385 | 184275 | SG05S964 | KCP_184275 | | A/G |
| 170042689 | 185579 | DG00AAJDX | KCP_185579 | | C/A |
| 170043158 | 186048 | SG05S213 | KCP_186048 | | A/G |
| 170043789 | 186679 | SG05S161 | KCP_186679 | | C/G |
| 170043953 | 186843 | SG05S850 | KCP_186843 | | A/C |
| 170043997 | 186887 | SG05S965 | KCP_186887 | | C/T |
| 170044226 | 187116 | DG00AAJDY | KCP_187116 | | A/G |
| 170044277 | 187167 | SG05S851 | KCP_187167 | | C/G |
| 170044368 | 187258 | SG05S162 | KCP_187258 | | G/T |
| 170044661 | 187551 | SG05S853 | KCP_187551 | | A/G |
| 170044798 | 187688 | DG00AAJDZ | KCP_187688 | | T/A |
| 170044904 | 187794 | SG05S966 | KCP_187794 | | C/T |
| 170045075 | 187965 | SG05S967 | KCP_187965 | | C/T |
| 170046043 | 188933 | SG05S968 | KCP_188933 | | C/T |
| 170046441 | 189331 | SG05S214 | KCP_189331 | | A/G |
| 170047120 | 190010 | SG05S854 | KCP_190010 | rs2221442 | A/G |
| 170047129 | 190019 | SG05S855 | KCP_190019 | | C/G |
| 170048070 | 190960 | SG05S856 | KCP_190960 | | C/G |
| 170048074 | 190964 | SG05S857 | KCP_190964 | | C/T |
| 170048090 | 190980 | SG05S858 | KCP_190980 | | C/G |
| 170048315 | 191205 | SG05S859 | KCP_191205 | rs4868015 | C/T |
| 170048733 | 191623 | SG05S860 | KCP_191623 | | A/G |
| 170049238 | 192128 | SG05S990 | KCP_192128 | | C/T |
| 170049852 | 192742 | DG00AAJEB | KCP_192742 | rs1973529 | T/C |
| 170050303 | 193193 | DG00AAJEC | KCP_193193 | | G/A |
| 170051066 | 193956 | SG05S163 | KCP_193956 | rs2202440 | C/T |
| 170051438 | 194328 | SG05S861 | KCP_194328 | | A/T |
| 170051462 | 194352 | SG05S862 | KCP_194352 | | A/G |
| 170051726 | 194616 | DG00AAJEE | KCP_194616 | rs2036560 | T/C |
| 170051899 | 194789 | SG05S970 | KCP_194789 | | C/T |
| 170052012 | 194902 | SG05S863 | KCP_194902 | | A/G |
| 170052171 | 195061 | SG05S971 | KCP_195061 | | G/T |
| 170052988 | 195878 | SG05S864 | KCP_195878 | | C/T |
| 170053658 | 196548 | DG00AAJEF | KCP_196548 | | A/G |
| 170053669 | 196559 | SG05S865 | KCP_196559 | rs7702368 | A/G |
| 170053840 | 196730 | SG05S866 | KCP_196730 | | G/T |
| 170053939 | 196829 | SG05S867 | KCP_196829 | | C/G |
| 170054581 | 197471 | SG05S972 | KCP_197471 | | A/G |
| 170054620 | 197510 | SG05S973 | KCP_197510 | | C/T |
| 170054788 | 197678 | DG00AAJEG | KCP_197678 | rs962804 | T/C |
| 170054803 | 197693 | SG05S884 | KCP_197693 | | A/G |
| 170054885 | 197775 | DG00AAJEH | KCP_197775 | | C/T |
| 170055781 | 198671 | DG00AAJEI | KCP_198671 | | A/G |
| 170055957 | 198847 | SG05S974 | KCP_198847 | | A/G |
| 170056043 | 198933 | DG00AAJEJ | KCP_198933 | | G/A |
| 170056137 | 199027 | SG05S975 | KCP_199027 | | A/G |
| 170056475 | 199365 | DG00AAJEK | KCP_199365 | rs6555911 | A/G |
| 170056516 | 199406 | SG05S164 | KCP_199406 | rs6887777 | A/T |
| 170056578 | 199468 | SG05S1257 | KCP_199468 | | C/T |
| 170057283 | 200173 | SG05S165 | KCP_200173 | | C/G |
| 170057351 | 200241 | DG00AAJEL | KCP_200241 | | A/G |
| 170057605 | 200495 | SG05S976 | KCP_200495 | | A/G |
| 170057933 | 200823 | SG05S991 | KCP_200823 | | A/C |
| 170058193 | 201083 | SG05S992 | KCP_201083 | rs4464713 | C/T |
| 170058699 | 201589 | SG05S885 | KCP_201589 | | C/T |
| 170059095 | 201985 | DG00AAJEM | KCP_201985 | | G/A |
| 170059177 | 202067 | DG00AAJEN | KCP_202067 | rs2221440 | A/G |
| 170059203 | 202093 | SG05S977 | KCP_202093 | | A/C |
| 170059905 | 202795 | DG00AAJEO | KCP_202795 | rs875184 | C/T |
| 170060219 | 203109 | SG05S1258 | KCP_203109 | | A/G |
| 170060292 | 203182 | SG05S978 | KCP_203182 | | A/G |
| 170060393 | 203283 | SG05S979 | KCP_203283 | rs905818 | A/G |
| 170061018 | 203908 | SG05S980 | KCP_203908 | rs905817 | C/T |
| 170061292 | 204182 | SG05S981 | KCP_204182 | rs872435 | G/T |
| 170061352 | 204242 | SG05S166 | KCP_204242 | rs6897344 | C/T |
| 170061419 | 204309 | SG05S982 | KCP_204309 | | A/G |
| 170061618 | 204508 | SG05S983 | KCP_204508 | rs872436 | A/G |
| 170061670 | 204560 | SG05S1259 | KCP_204560 | | A/G |
| 170061727 | 204617 | SG05S984 | KCP_204617 | rs6876574 | C/T |
| 170061799 | 204689 | SG05S1260 | KCP_204689 | rs905816 | G/T |
| 170061809 | 204699 | SG05S1261 | KCP_204699 | | A/T |
| 170061845 | 204735 | SG05S1262 | KCP_204735 | rs905815 | C/T |
| 170062696 | 205586 | SG05S886 | KCP_205586 | rs329466 | C/T |
| 170062747 | 205637 | SG05S887 | KCP_205637 | rs7721804 | A/C |
| 170062756 | 205646 | SG05S888 | KCP_205646 | rs329467 | C/T |
| 170062777 | 205667 | SG05S889 | KCP_205667 | rs7721817 | A/G |
| 170062940 | 205830 | SG05S167 | KCP_205830 | | C/T |
| 170062950 | 205840 | SG05S890 | KCP_205840 | | A/G |
| 170063305 | 206195 | SG05S891 | KCP_206195 | | C/G |
| 170063313 | 206203 | SG05S892 | KCP_206203 | | C/T |
| 170063377 | 206267 | SG05S168 | KCP_206267 | | A/G |
| 170063732 | 206622 | SG05S893 | KCP_206622 | rs7727631 | A/G |
| 170063817 | 206707 | SG05S894 | KCP_206707 | | C/T |
| 170063983 | 206873 | SG05S1263 | KCP_206873 | rs7710016 | A/T |
| 170064013 | 206903 | SG05S1264 | KCP_206903 | | C/G |
| 170064648 | 207538 | SG05S895 | KCP_207538 | | C/T |
| 170064760 | 207650 | SG05S969 | KCP_207650 | | A/G |
| 170064771 | 207661 | SG05S169 | KCP_207661 | | C/G |
| 170064881 | 207771 | SG05S896 | KCP_207771 | rs329468 | A/G |
| 170065075 | 207965 | SG05S170 | KCP_207965 | | C/T |
| 170065694 | 208584 | SG05S171 | KCP_208584 | | A/G |
| 170065711 | 208601 | SG05S232 | KCP_208601 | rs329469 | A/C |
| 170065715 | 208605 | SG05S897 | KCP_208605 | | A/G |
| 170065740 | 208630 | SG05S172 | KCP_208630 | | C/T |
| 170065834 | 208724 | SG05S1265 | KCP_208724 | rs7700434 | C/T |
| 170066123 | 209013 | SG05S1266 | KCP_209013 | rs7734240 | C/T |
| 170066260 | 209150 | SG05S1267 | KCP_209150 | | A/G |
| 170067967 | 210857 | SG05S898 | KCP_210857 | rs2194162 | A/G |
| 170068018 | 210908 | SG05S899 | KCP_210908 | | C/G |
| 170068420 | 211310 | SG05S900 | KCP_211310 | | A/G |
| 170068510 | 211400 | SG05S901 | KCP_211400 | rs410348 | A/G |
| 170068614 | 211504 | SG05S902 | KCP_211504 | | A/G |
| 170068635 | 211525 | SG05S173 | KCP_211525 | | A/G |
| 170068731 | 211621 | SG05S903 | KCP_211621 | | A/G |
| 170068759 | 211649 | SG05S1268 | KCP_211649 | | G/T |
| 170068960 | 211850 | SG05S185 | KCP_211850 | rs329470 | C/T |
| 170069885 | 212775 | SG05S186 | KCP_212775 | rs4349730 | A/G |
| 170070003 | 212893 | SG05S1269 | KCP_212893 | rs6877532 | G/T |
| 170070041 | 212931 | SG05S1270 | KCP_212931 | rs50057 | A/G |
| 170070593 | 213483 | SG05S904 | KCP_213483 | | A/G |
| 170070700 | 213590 | SG05S1271 | KCP_213590 | rs102684 | C/T |
| 170070735 | 213625 | SG05S905 | KCP_213625 | rs102685 | C/T |
| 170070768 | 213658 | SG05S1272 | KCP_213658 | rs102686 | A/G |
| 170071584 | 214474 | SG05S1273 | KCP_214474 | rs329471 | C/G |
| 170071665 | 214555 | SG05S1274 | KCP_214555 | rs329472 | C/T |
| 170071715 | 214605 | SG05S1275 | KCP_214605 | rs329473 | C/G |
| 170072023 | 214913 | SG05S1276 | KCP_214913 | | A/G |
| 170072363 | 215253 | SG05S906 | KCP_215253 | rs4041562 | C/T |
| 170072373 | 215263 | SG05S907 | KCP_215263 | rs172944 | C/T |
| 170072484 | 215374 | SG05S908 | KCP_215374 | | A/G |
| 170072485 | 215375 | SG05S909 | KCP_215375 | | A/G |
| 170072562 | 215452 | SG05S910 | KCP_215452 | rs191297 | A/G |
| 170072712 | 215602 | SG05S1277 | KCP_215602 | rs186646 | A/C |
| 170072813 | 215703 | SG05S174 | KCP_215703 | | A/C |
| 170073179 | 216069 | SG05S1278 | KCP_216069 | | C/T |
| 170073555 | 216445 | SG05S1279 | KCP_216445 | rs1363709 | A/G |
| 170073565 | 216455 | SG05S1280 | KCP_216455 | rs329474 | C/G |
| 170074202 | 217092 | SG05S993 | KCP_217092 | rs984559 | A/G |
| 170074303 | 217193 | SG05S994 | KCP_217193 | | C/T |
| 170074359 | 217249 | SG05S995 | KCP_217249 | rs329475 | A/G |
| 170075932 | 218822 | SG05S996 | KCP_218822 | | A/G |
| 170076291 | 219181 | SG05S997 | KCP_219181 | | A/G |
| 170076439 | 219329 | SG05S998 | KCP_219329 | rs801987 | C/G |
| 170077257 | 220147 | SG05S911 | KCP_220147 | | A/T |
| 170078779 | 221669 | SG05S912 | KCP_221669 | | C/G |
| 170078881 | 221771 | SG05S1281 | KCP_221771 | | C/T |
| 170078909 | 221799 | DG00AAJHJ | KCP_221799 | rs7733559 | A/T |
| 170078966 | 221856 | SG05S913 | KCP_221856 | rs7713498 | C/T |
| 170079102 | 221992 | SG05S1282 | KCP_221992 | | C/T |
| 170079170 | 222060 | SG05S175 | KCP_222060 | | C/T |
| 170079176 | 222066 | SG05S1283 | KCP_222066 | | A/T |
| 170079986 | 222876 | SG05S1284 | KCP_222876 | | A/G |
| 170080026 | 222916 | SG05S914 | KCP_222916 | | C/T |
| 170080378 | 223268 | SG05S915 | KCP_223268 | rs4868017 | C/T |
| 170080480 | 223370 | SG05S916 | KCP_223370 | | C/T |
| 170080678 | 223568 | SG05S917 | KCP_223568 | | G/T |
| 170080917 | 223807 | SG05S918 | KCP_223807 | | C/G |
| 170081127 | 224017 | SG05S919 | KCP_224017 | rs6555913 | A/G |
| 170081263 | 224153 | SG05S1285 | KCP_224153 | | G/T |
| 170081464 | 224354 | SG05S920 | KCP_224354 | | C/G |
| 170081779 | 224669 | SG05S231 | KCP_224669 | | A/C |
| 170082330 | 225220 | SG05S177 | KCP_225220 | | A/G |
| 170082361 | 225251 | SG05S1286 | KCP_225251 | | A/T |
| 170082496 | 225386 | SG05S922 | KCP_225386 | | C/T |
| 170083131 | 226021 | SG05S1287 | KCP_226021 | | A/C |
| 170083226 | 226116 | SG05S1288 | KCP_226116 | | C/G |
| 170083558 | 226448 | SG05S924 | KCP_226448 | | A/G |
| 170083941 | 226831 | SG05S925 | KCP_226831 | | A/G |
| 170084576 | 227466 | SG05S926 | KCP_227466 | | C/T |
| 170084823 | 227713 | SG05S927 | KCP_227713 | | A/G |
| 170084981 | 227871 | SG05S178 | KCP_227871 | | C/G |
| 170085097 | 227987 | SG05S483 | KCP_227987 | rs2277951 | C/T |
| 170085116 | 228006 | SG05S187 | KCP_228006 | rs2277952 | C/T |
| 170085151 | 228041 | SG05S928 | KCP_228041 | | A/T |
| 170085191 | 228081 | SG05S929 | KCP_228081 | | C/T |
| 170085217 | 228107 | SG05S179 | KCP_228107 | | A/T |
| 170085834 | 228724 | SG05S1289 | KCP_228724 | | A/G |
| 170086059 | 228949 | SG05S999 | KCP_228949 | | C/T |
| 170086143 | 229033 | SG05S1000 | KCP_229033 | | C/T |
| 170086250 | 229140 | SG05S1001 | KCP_229140 | | C/T |
| 170086709 | 229599 | SG05S930 | KCP_229599 | | A/C |
| 170086826 | 229716 | SG05S931 | KCP_229716 | | C/T |
| 170087721 | 230611 | SG05S932 | KCP_230611 | rs6894038 | C/G |
| 170087734 | 230624 | SG05S933 | KCP_230624 | rs6894316 | A/G |
| 170087780 | 230670 | SG05S934 | KCP_230670 | rs6875006 | G/T |
| 170087950 | 230840 | SG05S1290 | KCP_230840 | | A/G |
| 170088932 | 231822 | SG05S1291 | KCP_231822 | rs1422978 | C/T |
| 170089182 | 232072 | SG05S1292 | KCP_232072 | rs2194160 | C/T |
| 170089631 | 232521 | SG05S1293 | KCP_232521 | rs1592987 | A/T |
| 170090569 | 233459 | SG05S935 | KCP_233459 | rs6870201 | A/G |
| 170090765 | 233655 | SG05S989 | KCP_233655 | rs2032863 | A/G |
| 170091557 | 234447 | SG05S936 | KCP_234447 | rs6876375 | A/G |
| 170091681 | 234571 | SG05S937 | KCP_234571 | | C/T |
| 170091700 | 234590 | SG05S938 | KCP_234590 | | A/T |
| 170092075 | 234965 | SG05S939 | KCP_234965 | | C/T |
| 170092275 | 235165 | SG05S940 | KCP_235165 | rs1363710 | G/T |
| 170092318 | 235208 | SG05S941 | KCP_235208 | rs1363711 | A/G |
| 170092468 | 235358 | SG05S942 | KCP_235358 | | A/G |
| 170093047 | 235937 | SG05S1294 | KCP_235937 | | A/C |
| 170093362 | 236252 | SG05S943 | KCP_236252 | | A/T |
| 170094119 | 237009 | SG05S1295 | KCP_237009 | | A/G |
| 170094581 | 237471 | SG05S944 | KCP_237471 | rs1422979 | A/G |
| 170094615 | 237505 | SG05S188 | KCP_237505 | rs4867628 | C/T |
| 170094780 | 237670 | SG05S1296 | KCP_237670 | | G/T |
| 170095344 | 238234 | SG05S945 | KCP_238234 | | C/T |
| 170095662 | 238552 | SG05S947 | KCP_238552 | | C/T |
| 170095701 | 238591 | SG05S180 | KCP_238591 | | C/T |
| 170096774 | 239664 | SG05S949 | KCP_239664 | | C/G |
| 170097477 | 240367 | SG05S950 | KCP_240367 | rs6879997 | C/G |
| 170098637 | 241527 | SG05S190 | KCP_241527 | rs1363713 | G/T |
| 170098914 | 241804 | SG05S191 | KCP_241804 | rs1055381 | C/T |
| 170099451 | 242341 | SG05S951 | KCP_242341 | rs1363714 | A/G |
| 170099467 | 242357 | SG05S952 | KCP_242357 | rs6872337 | G/T |
| 170106814 | | SG05S1608 | SG05S1608 | rs1544762 | G/T |
| 170106833 | | SG05S1609 | SG05S1609 | | C/T |
| 170106887 | | SG05S1610 | SG05S1610 | | A/C |

[0284] TABLE 13
The Build 33 location of SNPs and microsatellites employed
for the subsequent association analysis across KChIP1.

| | | | | Varia- |
|---|---|---|---|---|
| Start (B33) | Marker | Public alias | deCODE alias | tion |
| 169477886 | rs1895301 | rs1895301 | SG05S2143 | C/T |
| 169500972 | rs1422752 | rs1422752 | SG05S1616 | C/T |
| 169518355 | rs1422754 | rs1422754 | SG05S1617 | A/G |
| 169653708 | DG5S1173 | | | |
| 169661202 | DG5S44 | | | |
| 169673519 | SG05S872 | rs6881730 | SG05S872 | A/G |
| 169678485 | SG05S873 | rs925080 | SG05S873 | A/G |
| 169693772 | DG5S45 | | | |
| 169696877 | KCP_rs315773 | rs315773 | SG05S76 | A/G |
| 169702377 | DG5S46 | | | |
| 169705506 | SG05S876 | rs315757 | SG05S876 | A/G |
| 169709736 | KCP_rs952767 | rs952767 | SG05S79 | G/T |
| 169740666 | KNB_24222 | rs314155 | SG05S1611 | A/G |
| 169740703 | KNB_24259 | | DG00AAIGF | A/G |
| 169741172 | KNB_24728 | rs2656842 | DG00AAIGG | G/T |
| 169745438 | DG5S1178 | | | |
| 169746339 | KNB_29895 | | DG00AAIGH | C/T |
| 169747941 | KNB_31497 | | DG00AAIGI | A/G |
| 169751742 | KNB_35298 | rs2075612 | DG00AAIGZ | A/T |
| 169751814 | KNB_35370 | | DG00AAIHA | C/G |
| 169751843 | KNB_35399 | rs703508 | DG00AAIHB | A/G |
| 169753660 | KCP_rs314129 | rs314129 | SG05S83 | C/T |
| 169782203 | KCP_rs183398 | rs183398 | SG05S87 | C/T |
| 169788696 | DG5S47 | | | |
| 169794522 | DG5S1592 | | | |
| 169815996 | rs1032856 | rs1032856 | SG05S96 | C/G |
| 169833941 | rs2055606 | rs2055606 | SG05S1621 | C/T |
| 169843903 | DG5S119 | | | |
| 169859275 | KCP_rs888934 | rs888934 | SG05S93 | A/G |
| 169867465 | KCP_10355 | | SG05S229 | A/T |
| 169867556 | KCP_10446 | | DG00AAHAR | C/G |
| 169869845 | rs933656 | rs933656 | DG00AAFCS | A/G |
| 169869955 | rs2339091 | rs2339091 | DG00AAFCI | G/T |
| 169890996 | rs1862331 | rs1862331 | DG00AAFCL | C/T |
| 169895699 | KCP_38589 | | SG05S953 | A/C |
| 169922309 | KCP_65199 | | SG05S955 | A/G |
| 169939578 | KCP_82468 | rs4242158 | SG05S957 | A/G |
| 169942903 | KCP_85793 | rs6892514 | SG05S958 | C/T |
| 169950655 | KCP_93545 | | SG05S64 | G/T |
| 169951970 | DG5S955 | | | |
| 169954954 | KCP_97844 | rs2202438 | DG00AAJIA | A/T |
| 169959992 | KCP_102882 | | DG00AAJIB | C/T |
| 169961410 | DG5S13 | | | |
| 169964490 | KCP_107380 | | DG00AAJIC | A/G |
| 169965813 | KCP_108703 | | SG05S230 | G/T |
| 169981987 | KCP_124877 | rs4146511 | SG05S194 | C/T |
| 169983196 | KCP_126086 | rs2202437 | SG05S195 | A/G |
| 169983318 | KCP_126208 | | DG00AAJHA | T/C |
| 169986203 | KCP_129093 | rs4867995 | SG05S152 | C/G |
| 169986237 | KCP_129127 | rs4867619 | SG05S480 | A/G |
| 169986800 | KCP_129690 | rs4867996 | SG05S182 | G/T |
| 169987419 | KCP_130309 | | DG00AAJHB | A/G |
| 169987667 | KCP_130557 | rs905822 | SG05S196 | C/G |
| 169987873 | rs905823 | rs905823 | SG05S1302 | A/C |
| 169988354 | KCP_131244 | rs905824 | SG05S197 | A/G |
| 169988964 | KCP_131854 | rs6861734 | SG05S153 | G/T |
| 169989787 | KCP_132677 | | SG05S154 | A/G |
| 169991155 | KCP_134045 | | SG05S198 | C/T |
| 169992628 | KCP_135518 | rs4868003 | SG05S200 | G/T |
| 169993146 | KCP_136036 | | SG05S481 | A/C |
| 169994770 | KCP_137660 | | SG05S202 | A/G |
| 170000722 | KCP_143612 | rs4867622 | SG05S66 | A/G |
| 170002070 | KCP_144960 | rs2279873 | SG05S203 | C/T |
| 170003856 | KCP_146746 | | SG05S482 | C/T |
| 170006326 | KCP_149216 | rs6555908 | SG05S205 | A/G |
| 170006645 | KCP_149535 | rs883849 | SG05S206 | A/G |
| 170006645 | rs883849 | rs883849 | SG05S206 | A/G |
| 170013842 | KCP_156732 | rs924876 | SG05S207 | A/T |
| 170015727 | KCP_158617 | rs2036559 | SG05S67 | C/T |
| 170015858 | DG5S123 | | | |
| 170017255 | KCP_160145 | | SG05S208 | A/G |
| 170022007 | KCP_164897 | | SG05S209 | A/G |
| 170026344 | KCP_169234 | | SG05S156 | A/G |
| 170030958 | KCP_173848 | | SG05S210 | A/G |
| 170031092 | KCP_173982 | rs6875696 | SG05S157 | A/C |
| 170031353 | KCP_174243 | | DG00AAJHF | A/G |
| 170032216 | KCP_175106 | rs2339095 | SG05S158 | C/G |
| 170032280 | KCP_175170 | rs6555910 | SG05S211 | A/G |
| 170032362 | KCP_175252 | rs7721722 | DG00AAJHG | A/G |
| 170033946 | KCP_176836 | | DG00AAJHH | A/G |
| 170037283 | KCP_180173 | rs2135046 | SG05S159 | C/T |
| 170037283 | rs2135046 | rs2135046 | SG05S159 | C/T |
| 170037347 | KCP_180237 | rs2135047 | SG05S212 | C/G |
| 170041190 | KCP_184080 | rs2292147 | SG05S160 | C/G |
| 170041996 | DG5S124 | | | |
| 170042689 | KCP_185579 | | DG00AAJDX | C/A |
| 170043158 | KCP_186048 | | SG05S213 | A/G |
| 170043789 | KCP_186679 | | SG05S161 | C/G |
| 170044226 | KCP_187116 | | DG00AAJDY | A/G |
| 170044368 | KCP_187258 | | SG05S162 | G/T |
| 170044798 | KCP_187688 | | DG00AAJDZ | T/A |
| 170046441 | KCP_189331 | | SG05S214 | A/G |
| 170049852 | KCP_192742 | rs1973529 | DG00AAJEB | T/C |
| 170050303 | KCP_193193 | | DG00AAJEC | G/A |
| 170051066 | KCP_193956 | rs2202440 | SG05S163 | C/T |
| 170051726 | KCP_194616 | rs2036560 | DG00AAJEE | T/C |
| 170053658 | KCP_196548 | | DG00AAJEF | A/G |
| 170054788 | KCP_197678 | rs962804 | DG00AAJEG | T/C |
| 170054885 | KCP_197775 | | DG00AAJEH | C/T |
| 170056043 | KCP_198933 | | DG00AAJEJ | G/A |
| 170056475 | KCP_199365 | rs6555911 | DG00AAJEK | A/G |
| 170056955 | rs2339139 | rs2339139 | DG00AAFCR | A/G |
| 170057351 | KCP_200241 | | DG00AAJEL | A/G |
| 170059095 | KCP_201985 | | DG00AAJEM | G/A |
| 170059177 | KCP_202067 | rs2221440 | DG00AAJEN | A/G |
| 170059905 | KCP_202795 | rs875184 | DG00AAJEO | C/T |
| 170061292 | rs872435 | rs872435 | SG05S981 | G/T |
| 170061352 | KCP_204242 | rs6897344 | SG05S166 | C/T |
| 170063377 | KCP_206267 | | SG05S168 | A/G |
| 170064771 | KCP_207661 | | SG05S169 | C/G |
| 170064881 | rs329468 | rs329468 | SG05S896 | A/G |
| 170065075 | KCP_207965 | | SG05S170 | C/T |
| 170068635 | KCP_211525 | | SG05S173 | A/G |
| 170068960 | KCP_211850 | rs329470 | SG05S185 | C/T |
| 170069885 | KCP_212775 | rs4349730 | SG05S186 | A/G |
| 170070041 | rs50057 | rs50057 | SG05S1270 | A/G |
| 170073252 | rs50364 | rs50364 | DG00AAFCD | A/G |
| 170078909 | KCP_221799 | rs7733559 | DG00AAJHJ | A/T |
| 170080678 | KCP_223568 | | SG05S917 | G/T |
| 170081292 | KCP_1152 | | SG05S176 | C/T |
| 170081473 | KCP_1333 | | SG05S921 | A/G |
| 170082330 | KCP_225220 | | SG05S177 | A/G |
| 170082789 | KCP_2649 | | SG05S923 | C/T |
| 170084981 | KCP_227871 | | SG05S178 | C/G |
| 170085097 | KCP_227987 | rs2277951 | SG05S483 | C/T |
| 170085115 | KCP_4976 | | SG05S187 | C/T |
| 170085217 | KCP_228107 | | SG05S179 | A/T |
| 170085217 | KCP_5077 | | SG05S179 | A/T |
| 170089631 | KCP_232521 | rs1592987 | SG05S1293 | A/T |
| 170090765 | KCP_233655 | rs2032863 | SG05S989 | A/G |
| 170094615 | KCP_237505 | rs4867628 | SG05S188 | C/T |
| 170095540 | KCP_15400 | | SG05S946 | C/T |
| 170095701 | KCP_238591 | | SG05S180 | C/T |
| 170096292 | KCP_16152 | rs4868018 | SG05S948 | A/G |
| 170098209 | KCP_241099 | rs1363712 | SG05S189 | C/T |
| 170098209 | KCP_18069 | rs1363712 | SG05S189 | C/T |
| 170098637 | KCP_241527 | rs1363713 | SG05S190 | G/T |
| 170098914 | KCP_241804 | rs1055381 | SG05S191 | C/T |
| 170105556 | D5S625 | | | |
| 170167429 | DG5S959 | | | |
| 170361737 | rs1551583 | rs1551583 | SG05S1619 | C/G |
| 170389497 | rs1457692 | rs1457692 | SG05S1618 | A/G |

[0285] In order to define SNP-only haplotypes, 66 SNPs (Bold entries in Tables 12 and 13) were further genotyped totalling 948 diabetic patients (538 with BMI<30; 410 with BMI>=30) and 570 controls across 600 kb of KChIP1, of which 58 were concentrated in the 231 kb region encompassing exon 1b, the large intron (where Hap D1 resides) through to exon 8. The most significant 7-SNP haplotype (Hap E—see Table 14) observed in non-obese T2D (p=1.33×10⁻⁶) is significantly correlated with D1 (D′=0.76 between Hap D1 and Hap E) and captures approximately 75% of the chromosomes that carry Hap D1. The relative risk of this 280 kb haplotype for all diabetes patients is 1.77, with a carrier frequency of 40%.

[0286] Hap E can be made more specific by adding more SNPs, e.g. by adding DG00AAJEH, the relative risk increases to 2.28 in all diabetic patients vs controls. This variant of Hap E, which we denote Hap E′, has a carrier frequency of 20.1% in all diabetes patients and population attributable risk (PAR)=12.3%

TABLE 14
Alleles contained within Hap E and Hap E′

| | Length | | | | | | | | |
|---|---|---|---|---|---|---|---|---|---|
| Haplotype | (kb) | | | | | | | | |
| Hap E | 280 | G | rs1032856 | G | KCP_rs888934 | T | KCP_93545 | C | KCP_102882 |
| Hap E′ | 280 | G | rs1032856 | G | KCP_rs888934 | T | KCP_93545 | C | KCP_102882 |

| | Length | | | | | | | | |
|---|---|---|---|---|---|---|---|---|---|
| Haplotype | (kb) | | | | | | | | |
| Hap E | 280 | G | KCP_169234 | G | KCP_186048 | | | A | KCP_16152 |
| Hap E′ | 280 | G | KCP_169234 | G | KCP_186048 | C | KCP_197775 | A | KCP_16152 |

[0287] TABLE 15
Association analysis of Hap E and Hap E′ in type 2 diabetes.

| | p-val | r | #aff | aff.freq | aff.freq (carr) | #con | con.freq | con.freq (carr) | info |
|---|---|---|---|---|---|---|---|---|---|
| Hap E | | | | | | | | | |
| T2D BMI < 30 | 1.33E−06 | 1.929 | 525 | 0.2549 | 0.379841195 | 527 | 0.1506 | 0.255828099 | 0.654 |
| T2D BMI > 30 | 0.015813 | 1.451 | 387 | 0.1959 | 0.315039082 | 527 | 0.1437 | 0.24617045 | 0.670 |
| T2D All | 5.04E−06 | 1.769 | 912 | 0.2270 | 0.350961655 | 527 | 0.1424 | 0.244220163 | 0.661 |
| T2D Males | 1.56E−05 | 1.831 | 526 | 0.2337 | 0.358157968 | 527 | 0.1428 | 0.244772025 | 0.650 |
| T2D Females | 0.001484 | 1.623 | 386 | 0.2187 | 0.34178225 | 527 | 0.1471 | 0.250938707 | 0.651 |
| Hap E′ | | | | | | | | | |
| T2D BMI < 30 | 0.000185 | 2.248 | 518 | 0.1229 | 0.215573079 | 453 | 0.0587 | 0.110434655 | 0.571 |
| T2D BMI > 30 | 0.015423 | 1.896 | 379 | 0.0966 | 0.174484759 | 453 | 0.0534 | 0.101016667 | 0.517 |
| T2D All | 0.000105 | 2.279 | 897 | 0.1130 | 0.20051463 | 453 | 0.0530 | 0.100301178 | 0.535 |
| T2D Males | 0.000551 | 2.243 | 517 | 0.1098 | 0.195525378 | 453 | 0.0521 | 0.098826539 | 0.545 |
| T2D Females | 0.004482 | 1.976 | 380 | 0.1101 | 0.195946622 | 453 | 0.0589 | 0.110893515 | 0.564 |

[0288] The teachings of all publications cited herein are incorporated herein by reference in their entirety. While this invention has been particularly shown and described with references to preferred embodiments thereof, it will be understood by those skilled in the art that various changes in form and details may be made therein without departing from the scope of the invention encompassed by the appended claims.

1. A method of diagnosing a susceptibility to Type II diabetes in an individual, comprising detecting a polymorphism in a KChIP1 nucleic acid, wherein the presence of the polymorphism in the nucleic acid is indicative of a susceptibility to Type II diabetes.

2. A method of diagnosing a susceptibility to Type II diabetes comprising detecting an alteration in the expression or composition of a polypeptide encoded by KChIP1 nucleic acid in a test sample, in comparison with the expression or composition of a polypeptide encoded by a KChIP1 nucleic acid in a control sample, wherein the presence of an alteration in expression or composition of the polypeptide in the test sample is indicative of a susceptibility to Type II diabetes.

3. The method of claim 1, wherein the polymorphism in the KChIP1 nucleic acid is indicated by detecting the presence of a least one of the polymorphisms indicated in Table 13.

4. An isolated nucleic acid molecule comprising a KChIP1 nucleic acid, wherein the KChIP1 nucleic acid has a nucleotide sequence selected from the group of nucleic acid sequences as shown in Table 10, or the complements of the group of nucleic acid sequences as shown in Table 10, wherein the nucleotide sequence contains a polymorphism.

5. An isolated nucleic acid molecule which hybridizes under high stringency conditions to a nucleotide sequence selected from the group of nucleic acid sequences as shown in Table 10, or the complements of the group of nucleic acid sequences as shown in Table 10, wherein the nucleotide sequence contains a polymorphism.

6. A method for assaying for the presence of a first nucleic acid molecule in a sample, comprising contacting said sample with a second nucleic acid molecule, where the second nucleic acid molecule comprises a nucleotide sequence selected from the group consisting of: nucleic acid sequences as shown in Table 10 and the complement of the nucleic acid sequences as shown in Table 10, wherein the nucleotide sequence contains a polymorphism and hybridizes to the first nucleic acid under high stringency conditions.

7. A vector comprising an isolated nucleic acid molecule selected from the group consisting of:
a) nucleic acid sequences as shown in Table 10; and
b) complement of one of the nucleic acid sequences are shown in Table 10; and
wherein the nucleic acid molecule contains a polymorphism and is operably linked to a regulatory sequence.

8. A recombinant host cell comprising the vector of claim 7.

9. A method for producing a polypeptide encoded by an isolated nucleic acid molecule having a polymorphism, comprising culturing the recombinant host cell of claim 10 under conditions suitable for expression of the nucleic acid molecule.

10. A method of assaying for the presence of a polypeptide encoded by an isolated nucleic acid molecule according to claim 4 in a sample, the method comprising contacting the sample with an antibody which specifically binds to the encoded polypeptide.

11. A method of identifying an agent that alters expression of a KCHIP1 nucleic acid, comprising:
a) contacting a solution containing a nucleic acid comprising the promoter region of the KCHIP1 nucleic acid operably linked to a reporter gene with an agent to be tested;
b) assessing the level of expression of the reporter gene; and
c) comparing the level of expression with a level of expression of the reporter gene in the absence of the agent; wherein if the level of expression of the reporter gene in the presence of the agent differs, by an amount that is statistically significant, from the level of expression in the absence of the agent, then the agent is an agent that alters expression of the KCHIP1 nucleic acid.

12. An agent that alters expression of the KCHIP1 nucleic acid, identifiable according to the method of claim 11.

13. A method of identifying an agent that alters expression of a KCHIP1 nucleic acid, comprising:
a) contacting a solution containing a nucleic acid of claim 1 or a derivative or fragment thereof with an agent to be tested;
b) comparing expression with expression of the nucleic acid, derivative or fragment in the absence of the agent;
wherein if expression of the nucleotide, derivative or fragment in the presence of the agent differs, by an amount that is statistically significant, from the expression in the absence of the agent, then the agent is an agent that alters expression of the KCHIP1nucleic acid.

14. The method of claim 13, wherein the expression of the nucleotide, derivative or fragment in the presence of the agent comprises expression of one or more splicing variant(s) that differ in kind or in quantity from the expression of one or more splicing variant(s) the absence of the agent.

15. An agent that alters expression of a KChIP1 nucleic acid, identifiable according to the method of claim 14.

16. An agent that alters expression of a KChIP1 nucleic acid, selected from the group consisting of: antisense nucleic acid to a KChIP1 nucleic acid; a KChIP1 polypeptide; a KChIP1 nucleic acid receptor; a KChIP1 binding agent; a peptidomimetic; a fusion protein; a prodrug thereof; an antibody; and a ribozyme.

17. A method of altering expression of a KChIP1 nucleic acid, comprising contacting a cell containing a KChIP1 nucleic acid with an agent of claim 16.

18. A method of identifying a polypeptide which interacts with a KChIP1 polypeptide comprising a polymorphism indicated in Table 13, comprising employing a yeast two-hybrid system using a first vector which comprises a nucleic acid encoding a DNA binding domain and a KChIP1 polypeptide, splicing variant, or a fragment or derivative thereof, and a second vector which comprises a nucleic acid encoding a transcription activation domain and a nucleic acid encoding a test polypeptide, wherein if transcriptional activation occurs in the yeast two-hybrid system, the test polypeptide is a polypeptide which interacts with a KChIP1 polypeptide.

19. A Type II diabetes therapeutic agent selected from the group consisting of: a KChIP1 nucleic acid or fragment or derivative thereof; a polypeptide encoded by a KChIP1 nucleic acid; a KChIP1 receptor; a KChIP1 nucleic acid binding agent; a peptidomimetic; a fusion protein; a prodrug; an antibody; an agent that alters KChIP1 nucleic acid expression; an agent that alters activity of a polypeptide encoded by a KChIP1 nucleic acid; an agent that alters posttranscriptional processing of a polypeptide encoded by a KChIP1 nucleic acid; an agent that alters interaction of a KChIP1 nucleic acid with a KChIP1 binding agent; an agent that alters transcription of splicing variants encoded by a KChIP1 nucleic acid; and a ribozyme.

20. A pharmaceutical composition comprising a Type II diabetes therapeutic agent of claim 19.

21. The pharmaceutical composition of claim 20, wherein the Type II diabetes therapeutic agent is an isolated nucleic acid molecule comprising a KChIP1 nucleic acid or fragment or derivative thereof.

22. The pharmaceutical composition of claim 20, wherein the Type II diabetes therapeutic agent is a polypeptide encoded by the KChIP1 nucleic acid.

23. A method of treating a disease or condition associated with KChIP1 in an individual, comprising administering a Type II diabetes therapeutic agent to the individual, in a therapeutically effective amount.

24. The method of claim 23, wherein the Type II diabetes therapeutic agent is a KChIP1 nucleic acid agonist.

25. The method of claim 23 wherein the Type II diabetes therapeutic agent is a KChIP1 nucleic acid antagonist.

26. A transgenic animal comprising a nucleic acid selected from the group consisting of: an exogenous KChIP1 nucleic acid and a nucleic acid encoding a KChIP1 polypeptide.

27. A method for assaying a sample for the presence of a KChIP1 nucleic acid, comprising:
a) contacting said sample with a nucleic acid comprising a contiguous nucleotide sequence which is at least partially complementary to a part of the sequence of said KChIP1 gene under conditions appropriate for hybridization, and
b) assessing whether hybridization has occurred between a KChIP1 gene nucleic acid and said nucleic acid comprising a contiguous nucleotide sequence which is at least partially complementary to a part of the sequence of said KChIP1 nucleic acid;
wherein if hybridization has occurred, a KChIP1 nucleic acid is present in the nucleic acid.

28. The method of claim 27, wherein said nucleic acid comprising a contiguous nucleotide sequence is completely complementary to a part of the sequence of said KChIP1 nucleic acid.

29. The method of claim 27, further comprising amplification of at least part of said KChIP1 nucleic acid.

30. The method of claim 27, wherein said contiguous nucleotide sequence is 100 or fewer nucleotides in length and is either: a) at least 80% identical to a contiguous sequence of nucleotides in one of the nucleic acid sequences as shown in Table 10; b) at least 80% identical to the complement of a contiguous sequence of nucleotides in one of the nucleic acid sequences as shown in Table 10; or c) capable of selectively hybridizing to said KChIP1 nucleic acid.

31. A reagent for assaying a sample for the presence of a KChIP1 nucleic acid, said reagent comprising a nucleic acid comprising a contiguous nucleotide sequence which is at least partially complementary to a part of the nucleotide sequence of said KChIP1 nucleic acid.

32. The reagent of claim 31, wherein the nucleic acid comprises a contiguous nucleotide sequence, which is completely complementary to a part of the nucleotide sequence of said KChIP1 nucleic acid.

33. A reagent kit for assaying a sample for the presence of a KChIP1 nucleic acid, comprising in separate containers:
a) one or more labeled nucleic acids comprising a contiguous nucleotide sequence which is at least partially complementary to a part of the nucleotide sequence of said KChIP1 nucleic acid, and
b) reagents for detection of said label.

34. The reagent kit of claim 33, wherein the labeled nucleic acid comprises a contiguous nucleotide sequences which is completely complementary to a part of the nucleotide sequence of said KChIP1 nucleic acid.

35. A reagent kit for assaying a sample for the presence of a KChIP1 nucleic acid, comprising one or more nucleic acids comprising a contiguous nucleic acid sequence which is at least partially complementary to a part of the nucleic acid sequence of said KChIP1 nucleic acid, and which is capable of acting as a primer for said KChIP1 nucleic acid when maintained under conditions for primer extension.

36. The use of a nucleic acid which is 100 or fewer nucleotides in length and which is either: a) at least 80% identical to a contiguous sequence of nucleotides in one of the nucleic acid sequences as shown in Table 10; b) at least 80% identical to the complement of a contiguous sequence of nucleotides in one of the nucleic acid sequences as shown in Table 10; or c) capable of selectively hybridizing to said KChIP1 nucleic acid, for assaying a sample for the presence of a KChIP1 nucleic acid.

37. The use of a first nucleic acid which is 100 or fewer nucleotides in length and which is either:
a) at least 80% identical to a contiguous sequence of nucleotides in one of the nucleic acid sequences as shown in Table 6;
b) at least 80% identical to the complement of a contiguous sequence of nucleotides in one of the nucleic acid sequences as shown in Table 10; or
c) capable of selectively hybridizing to said KChIP1 nucleic acid; for assaying a sample for the presence of a KChIP1 nucleic acid that has at least one nucleotide difference from the first nucleic acid.

38. The use of a nucleic acid which is 100 or fewer nucleotides in length and which is either:
a) at least 80% identical to a contiguous sequence of nucleotides in one of the nucleic acid sequences as shown in Table 10;
b) at least 80% identical to the complement of a contiguous sequence of nucleotides in one of the nucleic acid sequences as shown in Table 10; or
c) capable of selectively hybridizing to said KChIP1 nucleic acid; for diagnosing a susceptibility to a disease or condition associated with a KChIP1.

39. A method of diagnosing a susceptibility to Type II diabetes in an individual, comprising determining the presence or absence in the individual of a haplotype comprising a halotype shown in Table 2, Table 4, Table 5 or Table 14 at the 5q35 loci, wherein the presence of the haplotype is diagnostic of susceptibility to Type II diabetes.

40. The method of claim 39, wherein determining the presence or absence of the haplotype comprises enzymatic amplification of nucleic acid from the individual.

41. The method of claim 40, wherein determining the presence or absence of the haplotype further comprises electrophoretic analysis.

42. The method of claim 39, wherein determining the presence or absence of the haplotype further comprises restriction fragment length polymorphism analysis.

43. The method of claim 39, wherein determining the presence or absence of the haplotype further comprises sequence analysis.

44. A method of diagnosing a susceptibility to Type II diabetes in an individual, comprising:
a) obtaining a nucleic acid sample from said individual; and
b) analyzing the nucleic acid sample for the presence or absence of a haplotype, comprising a haplotype shown in Table 2, Table 4, Table 5 or Table 14 at the 5q35 loci comprising a KChIP1 gene, wherein the presence of the haplotype is diagnostic for a susceptibility to Type II diabetes.

45. A method of diagnosing a susceptibility to Type II diabetes in an individual, comprising determining the presence or absence in the individual of a haplotype comprising one or more markers and/or single nucleotide polymorphisms as shown in Table 13 in the locus on chromosome 5q35, wherein the presence of the haplotype is diagnostic of a susceptibility to Type II diabetes.

46. A method for the diagnosis and identification of a susceptibility to Type II diabetes in an individual, comprising: screening for an at-risk haplotype in the KChIP1 nucleic acid that is more frequently present in an individual susceptible to Type II diabetes compared to an individual who is not susceptible to Type II diabetes wherein the at-risk haplotype increases the risk significantly.

47. The method of claim 46 wherein the significant increase is at least about 20%.

48. The method of claim 46 wherein the significant increase is identified as an odds ratio of at least about 1.2.

49. Use of a Type II diabetes therapeutic agent for the manufacture of a medicament for the treatment of a disease or condition associated with KChIP1 in an individual.

50. The use of claim 49, wherein the Type II diabetes therapeutic agent is a KChIP1 nucleic acid agonist.

51. The use of clim 49, wherein the Tpe II diabetes therapeutic agent is a KChIP1 antagonist.

52. A method of diagnosing a predisposition or susceptibility to Type II diabetes in a subject, comprising detecting the presence or absence of a genetic marker associated with the KChIP1 gene, the marker having a p-value of 1×10⁻⁵ or less, wherein the presence of the marker associated with the KChIP1 gene is indicative of a predisposition or susceptibility to Type II diabetes.

The application's sequence listing, which the Patent Office published only in electronic form, follows.

SEQUENCE LISTING (258 sequences)

SEQ ID NO: 1 - DNA, 382256 bp, homo sapiens
caggagtgggtggagagagggagggagagtttgccctgcaggctctctggatgcagaagccagactcgctgcagaggcagctgtgctgttcccggagcctggcttcaggggtgcatccgtcactcagggttcattcacccaggcaggctccaagttcctggggtgcacaaggtgggcactgtcccttctgggtgctgacagcagagcctggctcccctccgccaccatgagcggctgctccaaaagatgcaagcttgggttcgtgaaatttgcccagaccatctttaagctcatcactgggaccctcagcaaaggtatggaaactggccttgacccttgctttctgtcttgatatggcctggctggtcgcattgcctcggtgtggtgagcgtgaccattctggtgcacccaggtcttggaaaaagctggggaaattggtggctgggattcgaggttgctgacaacctgcgtcctggctttgagtaggcgggcacccagccagggaactcagctggctgtaattgcctggaactttggaaatggagttggtggtgtgtggctgatacgttatgggcgggcagagggatagaaccctttccagagcattggaagtggcttagcgtgactggagtttcaagaagttatccatggaaggttgtattttgttgataaaagagagatttgatgcagtgggttgtgagtaattctgcagaacagagacgcttgagggggccagtgggaggtggtgatgggccggcatctgctttgccctggtggcttcagaaaccggatcagctctgcacctcaagtgccaagagcctcctctcatagggttccagcgtctcgtgcttctggggcttcattcatcgttctgctttcttggatccctgtccctccacatttcatgcctatgtccatgcctgtcttttctgcttctccaggaactggggtggcaggtggtttgcaggagtaactgtctgggcagatcagaaagtgtggctatggaccagaattagggctgcagccccagatgggcccacagccgggaggcagaaagaaggctaactcctcagggcccagtcctgtgtcttaaaccccattttacacttggcaccagggaaggtgaggccctcagaggggtctggccaactttgtggagatgatgtcaagggagagcagcagcatgatgtggttccactggctgaaaaaacgtctttaaatattcatgctgtctttcaggaagagtctttgggggctggggagagaggcactggaagcagcaggcagaatattcagggaaggagcccacaaaactttgatgggattttacaaaatgacaatgagagcagagaaaggctatatgcagccagatctcatgacatggctcaggtgcccgccacccagcgggtctggcccagtgtacgttgtgtggcatgtgtgggtggtgggaatgatgggattctgtttatctccttccttgggatgttctgaccttcctgttatttccctaccatccttctgaagtggggcactgctcttccaagatacccaggtgggctgagcccccaatgtggagggccaggctgcctggcagaattcctggaggccagaagtggggtaaacaggaggttaatgggtatagctgtgattgctctcagtggctttacctcctggagaaggagaaagcaaaggggttaggaaatttcacaaagtctccccattcaatcctcagagacagctggaaggttttctttcctcattacagatagcaggacctaagagggtaatgggtgtggggcagcaacccattgcagcctctcatggagggcttgtccccacctgcagtctagtggcgacccagaccccacacacagatgctccctggatgccacactgagtgctgagatgggggaatcatgggggtcaacaggcatagagaagagatgtctggggcagactaaggagtgcctccaaacagtgacatctaagctgagatgaggagaggcagggctgagaaggtgggaggaagccgaagctgccagagggagcaacatcagagtgttggcctctgcaaggaaccagctggagagtcagaatgcctccctctctctgctcagaatcccagaaactaagatccatgtgacacagaagggactccgtggggacctggccttcctgtgaactgcttcagtacagcctttcctgtggccagggctcagagaggcagcccatggcaggcaccagggcaggattgtgtcttaaccgcatctgtcttctttgcttcagctccgcagagaggaccaagtgtttacacagccccggctctgcgccaggcacgtgctaggtgactggtgttctacccgatccaggtgtttgctaaatatttgttaaatagtgaggaacatgggagcagggccaggctgggagcagggtagctgagaaaggcctgcagagagtccagaaaacggctttctaatgtttacacctcccctaggtggatttagattcaaccctacatggatacattatgattgcttaatgatttctgattttaatttgatttcacttattcattattcattgcactgagttctagatttgcagtaatccaaccctcaggagagggatttttctttgtcccttgcagaactgaggaatgtaaagaatgtgttggaccaggtacctgcttgttctatggcaatttactgtttcttaccagccttgcaaatacctgggggacaaggagggtccaggatcaccctccctgtcctgcctgttcctaacccttggccacctcctgccatgccagaaatccttcttgccatttgtctaagatgccagctagcccagatttctcatcagcgcttattgcagagataaactgctcatgtccacctgctcacatatctcatcaaccttgaactttccttcctatccctgatcataatttgtggtctgcattccctttaggaacatgtttgctaaaggctctcttccccactagacttcagctccatcatggcaagaccatgtgcatttttttgctcaccactgtggccagagctactagcatggggcccagaatggagtatgtgtgttaccgtgttaaacgaatgcaacggcaccgcacggcacagacaccagccgtcagcctgagatgacccctggtacaggagctttctaggaagcactatgcaacacctgtcccacaggtgctcagcaaatgctctctgaagtctgtttagctgcagcaagctgagtctgcagcctccagcctccagcctgcgtgagcctccagccacgtaaaacattcaggctgggtctgagcttgcatagtgtctagggaagggcattaagattgttcccagaaggaaaggctgggtgggcaggcttctggcatccccactcccacccctctggctctatttttatttgttttatttactggatttctcccacatttaaagaatctctttggcattaaaaaaaaaaaaaatttcaaaccacgaatgcagtgaggagcacagttggtttctagactgagacatccccggaccctgcactgtggctcggaagcctcggactgggtccctcacctccctggcatttagtttcctcatctataaaatggaattacaatacccttcttatggggttgaatgagattgtgcagataaagctccctgcctattaggtgctcagtagtgttgatggatatgacttctgttattagcggatactctcatggttgagagcccctccgggctgggactccctctcactcattacttgttttctcagcaccaggcacagattctaagagcaacatctcatgatcactttatgaaagcctatggccttgtcagttactgcatgactttatttatttatttattttgaggcagggtctcattctgttccccaggctgagtgcagtgatgcaatcacggctcactgcagcctcgactttctgggctcaagcaatcctcccacctcagcctcctaaatagctgagaccacacatgtgcaccaccacaaccagctaattttgactgtttatagagacagggtctcactatgttgcccaggttgatgtcaaactcctggctcaagagaccctcctgccttgggctcccaaagtgctgggattacaggcatgagccaccacgtccagccactggatgactttagaccactgcttcccctctgctcaacttgttttcttaagggcctacccagagccatctccctcacctgattccttattaggagttaaaagcctgactcccagagccaggtcctcgcctgctgtttaacctaggagaagcccagctcctggctcggatgcttggtgaaatcaggggtctggggaacctgcgtcttcctctttctgcacagtcagctcccctccacccgcctcacagacttcctgggggccgctggcaggaaccagaagttgtgcaggctccattctggctggggaggtttaaactcatctccttctgcactgggaacaaatgttaccccaggcacagatgacagagccaaagtgagcagaagggaggaatccaatccaggagagcttctagtgtcctccaggccacccatgaggctgcgggggtggggaaaaggggtgtgggaagatgagatctatctcaaggacaaggccctggagccgtaactctcccctcccgcccaggcccaggctgttcctcttttttcgaggcaaaacctcagctgccccatcagtgacacactgttcctcttgcctcctcccactgctgttcaagatcctcaagagactgaccttggacccgggcatggactctgccttcaagcaggccaggctggagtaccaactctgcctcttaccagctgtgtgaagttgtgtcatttgaacaccaccccaagccaaggctccccacttttaattggagataataataatatcaatggcacaaggctgttttttaatgtaatgatgatatgagtaagagatatcagctcacaggcaaatcccaactctgctcttgcagggcacccgcccccgcttacattttgtgccctaggcaccttccttgcctctttctagtcttgatcctggaggtagggattgcaatcaccatttcagcaggtaaggaaactggggtttagctaagtgtcgtggctcccctggtgagtggcagagctgggattagaacccaggtcttgctgcagccaagacaaggtacattcctctgcactcctagggctggagaagtcacgcctgcctgcactactccccaccttgccaccagcagagagtcccccagcgtcccactaattctgttggtgggtttttccctgctgggtctgatcagagcagccacctgtcatgcaaagggttgtgacaaattccataaagtgtcatcacctgggttatggggaaagggaacactccagaggccaagatcagcaggacagccatacccatgctctctcagtatccctatcacctctcaggcaggtgtgcaggcccaaagcacctgccagacactgagtaggctctgtcccatgagggccactcccccatggctctcccttcttacaggccaagtgtgagaagtgttcttgggtgtgggaaaatacacacaaagttttggacactaggcaggctggaattgaggtgttgcagctgtttactggaattgtctgggaaagcagaagccttcacactggggactttgagacctgtgagatatcatcatccctctaccaagaggagaatgccacctgtcccatgaaaagctaagcttcaatgctgccccttgctggggaaagagagtccccaccatccgagtcctggctcgctcactgtcctggcagtgaggggctgagcaagcactctggtcatgttacaacagccccactcactctctgcaaccctggaacctctgagtgccagtgctttgtcacaggaagaaagtttgattatccagggcttctgggtccctgcctacctctccagccccaagctagagcctgccaggaggggcatgtgttcaccttggccctcctgatgtccagtagccttcatcccagcctactggcctcaccacccttgcccctctgcagcaggcccagcattccctgacccatttgggttgttcaggtgctcagctcactagggtctccatagtcccacagtagaaggcagagaagaaggagggatcacctgcccctctggagcctccgggtctttctcctagataaccctgttaccatgcaggagtaatttgttcagggccatttatcctggcactgctgcacagacatcctattaacttcaggaccacaggggagcggctagtttgctccaaattaaaagtagctggaaacggggccctctggcaggcaggagagttcaggctgccacaccacagccctgggagaagtggatctagtcaggtcttcatcagccttctaagtccagggcctcctttgccatgccacagggaccctcatcttccccagtcttcttagggttacagaatctcccctgggccatctctctcagcagacccaggtcccaaatccctgaaagcctttgcttcccaagggtggaagtggcgatgtgaagtcactgtggaaggaagcaggatgcagggcgggaaaactctggacccagagggacctgggctccaaccctgccatgcaccaacaggacagccttgggcaagccattccccatcttgagtctgtgtccttccgtaaatgggccagtaatttccatctcatgtggctactggagatggaatgagatgggacatgtgacaggcacaggacctggctcatacaagctgctcagtaaaagtcaagttccccacccttcttttctatgatacgaccttggatttgtagccaagagaaacaaggctgagcctctgtgggtcaagtcctcttcccagctcctatccagatgtgctgctatttcaaaattatcccccctgcccccagtcactcttgatgacaagttctataattaaaaatgtgccaacaatggaaatgatcctttttatttagttgttcatgggagaattggtcatccattctcatgagaatgggagccctgtgaaagcgttcaccacgttcaccacgtgggaatcacctagagtgagtgcctcaagcacctgcagccgaggaaggaaggttgaataaataacgactaaatgctttccctgccgagcaacatcaggccatgtggctggagttccctttttgaggtctggtcttagtcaggcttgctctggagcctaccactccctatctcccttgtctgaattcctgtgctggagtttgacagcagtgaccagccagaacgacctggatgagacaagggtcagtgcaaacaagaccaaaggcctgttcctgcccccattccgctctcatgctctgctgggggactgcccctgggtgcaggcccacactgcctatgcatcacagctggccaggtgctcaggtgaggcggcggttcttccccgttgtccacctgcaccccacccagaagtgcaggaggagggaccccactgaaaggcaggcagcaggggagaggagctttgggggagaggatgtggaaatgaggaaattgcataggcctcccgggccagctggaggaaagaaaggccaggactcctgaaaaagactcatgggaagtcatttactatcaccactgaccacgctctctgtcacaggtcttcagtctaggggcagaagaaagccttccttctctgttaggatgaggggaggaggaccatgaacacaaagctaaccttggtcccctctggctgaagccactgagattccattttgtgttcttagaagaacacccgctttggagccagacctgggtttgagtccaaatcctcacaactgcttgctgtcttaggccatcaggctgcttatcaacctgatggcctaagctaccatacaaagacacggtggcttatcaacaacagaaatgtatttctcacagttctggaagctggaagtctgagatcaggatgctagcactgtggacttctcgtggggactcttcctggcttacagacagcatctcctgctgtattctgacgtggaggaaagagagtaagctagctctctggcctcttcttatagacacaccccattcaagaggctccgccttcatgacctcatcacctcccaaaggccccaccttcaaataccatcacctcaggagtgggatttcaacatgtgaatttgggggacgggaggcacaaatattcagcccattgcactaagtaaatggcttttttttctgggcttcagtctcttcatctctaaaatgaaggagctgctgatttcaaaggcctctttcagctttggaatttaaagattaaacaaaattgcagcactgctggtggcacctgccatgtgcccagcattgcctgagcactccatgcccaatattttatttagtgcacatgagaaacctaggaggtggagtgctctaattaaccccacttacagatataaagagcgagcttcagacgggggaccggcctgcttggagtcacacagccagcatgaagcatagccacaactggaagcctaggcggtctggccccaagccctgggttttacttccctccccagcccatccccagtacactctttccatttctgaaaatcagatccagggtaagaagcaacgaagacaaaacagattccttcccagtttggccaagaggcaacacacactcttgttttcgaaatcaagacttcaggacctccattctgactgaggaagtgcaattgaggagaatgccctctgagactcaagctccccgatccatcccctaaaccgttacccataggtcacctttcacagtcaaacaacaaaacatatggggagcaggcccgacagccaagactacagggaggggagaaaaaaggaaacaccacccagcaagatttcctgttgtatttctagtctggccaattttcatttattgctggaatgaggtcagttggaagctgaggcagagaattgggcaggaatcaggtagggaggtgtgattctggggcttgtatctgagaagctggggttagcctaattttctttctgtaatcttttgattaactgtgggccagtttggatgacatttttcaaaccatctgtgcttggcaggctgggccgagcccaggcttactgctcggtgtctgcaaaactcagcttggagccggctatcacccggagcctgggatgtctctaagccatgaagcatattggattgcagaatgatccacaacatccctgtgctgattaactctgcccaggcctcacaagttcagaaacagtggctgtcatttcaaacgcaacaggaaacatgaggggaagggccatcgccatcctctgttgagtgctacctattttctgggggctttacaaggattcctatattcagtccagccctgtctctgtgagttgtttttattccaaaccaggggctttgagaggctgaataacttgccaacatcacagatacagcactgtggttgaaaaggtcatgtgcaaacactaatgttcctttgaacacgcctggtcaaacctgtcagcaccgtcacttctgtcacagactgaattgtgtccccttaaatgtgtatgtcaaagccctaacccccaaggtggctgtatttgatgatagggccttgatgcaggagattaaggttaaatgaggtcataaggttgggatcctaatccaacatgactggtgtccttgtaagaaggggaagagaccaggagtacacacacacagaggaaaagccatgtgagggcaagatggccaactacaagccaggaaaagaaacttcatcagacaccaaccctgcccgaaccttaatcttggactttcagtgtccagaactgtgggacaatagattttcgttatttaactacccagtctgcgacattcgattatggcagcccaagcagactaatacagccccatagaccattctttgcatagcatcctttcctatatttttaactgtgacaaacatatataacattaaatttactattttaaccatttttaagtgcacagttgtggctttaagtacattcacatgttgtgcaaccatcaccaccaaccatctccagaacatttttcttctcgcaaaactgaaactctgcactgcacccactaaacccttccccatttctgtctaccctcaggctctggcagccaccactgtactttctgtctctattaacttgactgttctaggttcctcatataagtgagtcatgaacagtatttgtgtctggcttatttcacttagtgtaatatcttttttttttttttttttgagatagggtctcactctgtcatccaagctggagtgcagtgctgtcatcacagcgcactgcagcttctacctcctgggctcaagcaatcctcccacctcagcctccagagtagctgagactacaggcgtgcgccaccaccacacccaactaattttttaaaattttttatagagatgaggtttctccatgttgcccaacctggtctcaaactcctaggctcaagtgattggcccaccttggcctcccaaagtgctgggattccaggctgccatacctggccctcacttagtgttatgtctttaaggttcattcctgtaacagcctgtgtcagaattcccttcctttttaagtttgaacaatattccattgtctggatactacattttgctttttatccattgatggaccattcccatatttttaaaataaaaaatgaatcatatacgattataatccccttactggaaactgtctccagtggtttcttgacacatttagaattaaatgcagactcctctcagtggcctgtgactttgcatgatccgtcctctgcatttctgtccttctccttggactctttccaccaaatacccccaggctctctccctcaattcattcaaatcccctcctgcggttgccgtccctcctcatctcccccaacacattgcctaatgctgccttgcttttctgcacagcccttactgctcctgcaataatattacacatgtgtttgcttggtgattttaaatgttttaatggaaaatgtctatgtttaaggtatacagtgtgatgtcttgatacacacatagataatggcctgattatcacagtcaagctaatgaacatatccgtctcttttcatagttacctttctgtgtatggtgagaactactctcttagcaaatttcaagtatacagtgcagtcttatgaactacagtctccttgctgtgcattactctagagcttgttcattctccatagctgaaactctatacgctttggccaacatctccgttattcatttgtttatgatccagctcatccactaagagtcgagctctgtgagggcagggaattttgcctggccttgactacttccccagcacctggtgcagggcctaccacatggtaggccctcattgggagttgagaggttgagctggcagatgaggaacctgaggcctggggaaggccacccagcaagccagacgcagagctggccttgaatctgggcttcctcctctttccattccctacaggctcggcactgcatgccctttaaaggttccagttctgtatccaccatttccacgtccgtctgtccatccacacttcctccttagcaaggccgcccatgttcctgcatccaggacatgaggggttaattaagatagtcatctggcttctcaggctaccatcctaagaacagccctcctcagttctggagctggcgggccatttggttcatctttgatttgttcttgccatggagagaggggaacctgccgctgggaaaggatggcgatggtttccagtgtgctctgctccattcagccaaggggctcctctgggagggcatgaagtgagcagtcaccagcgaaggcatctgggggctgcagacgcagctggcttccatggctgtgttcccctccagcccttgaggatccaggactttctggaaacatgattttggagttcactggatgctgaatccattaccaccaaattgtgtgaccttgggaagtccaagggagtcactccttcgagcctagcctccttttctgtaaaatgtgtgcaataatgccaataccacaggtttattaaagtaacgcacttaaaagtgtttagtgtagggcttgtgtcaaattaaggattcaacaaatgatgggtggttttgcttttatttggctttgctgtttatcagggctgagcttaaatctccctcattgcatcctaggcaaaccagggacctcccatgtcttgggaaacggctgagtgactgaaatcacccacgtgggccagaaaagagtgagagatgttttcaacatactctttgcctttcctttccctacccgggatgcgagtatcagtgacaaagagttttattctagggagatgagacaggagagctcacactgtattcattgagcaagctcttcatgtccagaacctttaaaatctcctgtacactcctgccccactcccagcccacactctcctacggatgaaaaaataagaaggggcagtaaaaccttgtctttgtatagagtccaccgggggctcaacagaggaggtggaggaggcctcagacctggatgtcgtggcagtcactgcaccctgggtcagagccccctgaggacaccaccctggaagggagaagctggctggaaccacaaagccccatggacaagcaagctctggcactacctttgagcatctgctgtgcctgctggcctgtctcacagggcacatgaggtaaaaagacatcaggcacaggctcccccatgttcattatatctggaaatttcagtctggccaagggagcttctgagagcctgaaggtggccagtatgtgactggaagtcaaggccacatggcacagtgaccagcgtgagactcctccaaatgtcctcagtgtaagggtggggaaactgaggccagagcaaggaacacccttgagtaagctaccctcaaaacggagcctcctctggctggtagctgggggcacagggatggagggtagcctggcccctcctggaagtggtggccacccagcagatggctcttcattgccacacagccgatgactcatagactaagcccaagcaagacccctcgcctcctcccttcatctctgcactctccccttcatggcctcacctctgggggagactcccaagtctctctctcttgccttggctcttttcttaagctccaggcctgcaggtgactccttggctggactgtgaacttgttggaagggcaggggctacattttagttatttaagaacgtgcagtctggcacggtggctcacgcctgtaatcccaacactttgggaggctgaggcaggtggatcccttgaggtcaggagctcgagaccattctgaccacagcgaaaccctgtctctactaaaaatacaaaattagctgggcatggtggcacatgcctgtaatcccagctacttgggaggctgaggcaggagaatcgcttgaaccagaatgtggaggttgcagtgagccacaatcacaccactgcactccggcctgggcaacaagagcaaaactccgtctcaaaaaaaaagaagaaagaaggaaagaaggaaagaaaaagaaagaaagaaagaaagaaagaaagaaagaaagaaagaaagaaagaaagaaagaaagaaagaaagaaaggaaagaaagaaagaaaggaaagaaaggaaagaaagaaagaaagaaagaatgtgcagcacccagcacaagacctggcatagagtaggggcctaacaaatggatggattgatggaggatgggaggaaggaccactagacccttccagttgaatgtctttctatagcccctactcaatccttgtaaaaccaaaggagacctctctctcctgattttactctttctctttacatgtcccagtctcgagccttgttctttccatctgtcactccctttccactctcagaaccgttcctgaaatctgaacctttctaacctctcacccgctttgctgcagcagcctgcagactgcgtttcttcccatttcttccctttctgactcctccacaccattccaaagagatggcccatctaacccattgacccagaagccctacttctagaaatctattctaagcaaatcatcacagctgtgcatacggacttttatttagaggtattcattatggtattattgcattatttataacagtgaaaaactggaggcaatctaagtgtcaatggaaaaaattgtgtattaaataaattttggttcatctgtctgatggaacaatattaaactgttgaaaaattattttaggaactaattaataacctagagaaatgctattgatatcgtatcaagtaggaagccaggagaaaaaaaactgtatgatgaatgcagttccagtctgtgggaatagatgtgtatggaaaagtaaaatagagaagaaatacactgaaacattagtttaggttttagcttggattaaaggtgagtttttaaagtttttgtttgtttgtttgtttgtttgtttgttttattgagacagagtctcactctgtcaccaggctggagtgcagtggcgcaatctcagctcactgcaacctctgcttcctgggttcaagtgattcttgtgcctcagcctcccaagaagctgggactacaggtgccggccaccacagccagctaatttttgtatttttagtagagacagggtttcacaatgttttccaggatggtctccatctcctgaccttgtgatccgcccgcctcagcctcccaaagtgctggcattactgttgtgagccaccgtgcccggcctaaagttcttcttgatgcttctctgcattttctgaattgtcttcaataagcatccatatttaatcagaaaccacaaacatatcattcactaaatacacatcttcaatcatacagttctcagtatgggaacgcatgaaagttctgctttcactggcatatcactggctgttcatgccatgtggcaatacaccccgaactaccagatttggcactcccagccctaaccccacagtctcagacctcagcccactccctagtcctgtgtccccgtgaccaaacccacacacgcattctcctccagccaaactggtccccacatgtttccaaaccagccttctgttctgtgctcctcagcctaactctcaaatggttcagaaacacaaattcgcatgtgcacagagagagacagagacagagagaaaatccaaatatgataaaatactgatcatcattggtgaacctagatgaaggggaggcatgcttacaatttgcattgtagttggatattttcaaaataaaaagctggggaaataaaggagcagtgtagtatagtatttaagggcataaattctgcatgaaattaccttatttcaagttccagtcccactgcctattagttgggaagtagtaacattaggcaaggtacttactttctaagactcagattcttcatcagtaaaatggggataatgaaaatcctggtgtatttgtttcctacagttgcccagagaatggaatgtatgtgtgtaaagggcttggcgaagagtgccacacacccttgatcatgaactgttagtatcagtgctaaatatagaaatcaatttattaaccgtgactctattcatgatattctctacctccataagctgctcatccctggacaactaagtaaagtgctacagctttggaaacttttcttgcacggttctttttctgccactagccctggaagctgctccaatgcggtgcctgccccgctggtatccatacctccaggccctggcacagagcctggcaagggggaagaagccattaaatgcactgaaccccaaatgagaatctcaaagggttcaagctgtactttaaagaaaactcttctcatcaggaccaagtttgcacttttgctgatgcagccactctattcccatgggcttccttgagataaggcatcaccttgataaattagctgtagatataggcgtcttgcagttggcatgggaaagcaatttaatttccaattaagcctgatttctgggccaggaggttggcctacctcgcactggaaggattattctggccaggcctattattatcacgggtcatgattctcccatgaagtggactctcaaggaagctggtccttcaaccattggaatggttcagtgaggcagaaatacggcctctgtgggtaggaccctttttccccaggaattaagtttatacaagtagagtcagggaagttcaaagcaaagataggcagtctgtttgtggccaaaattgttaagtcagggtacccctagaaatgaagcaagaggggagagagagagggaggtgaggcagtcatcaatcaggcccacaagcaagagaggcgggaagttgctagtaagaaaaagacggcaggaggtagttctctgagcccaaatcgaaaagaatctgaattatcggttgaaggagacacacttacttgaagagagaacagacatttgtgaagcatcttttatgcaccgtgctgagtacttcacattcatgattgatgatacaatgcaccctgtaaaacaaacactgtgaggctcactttccaattgaggaaactgagattcaggaagattaaataaactgcccaaagtcatgaacaaggcagattcaaactcttgttttcctgagcttttctccctgcaggctccctctcaaagacaaatacaaaaacatcatttagggccataaggataatgccatactcagctgtatcttacccaccaaaattgtaagcatgagaaaaaggcctttcaaacaagtcctgagagagtgaaaataaatggtggctgaggctgcttggggcgaatgatctgatggaagagctaacaatatctacttctcttttgggtgttgtttttgctcccatctgtccctcaaggagggagacctgagacctgggcgcaatggcccagcatggctgagaggctcctgtgaggtcaggatctcctcccacagctcagactgcttcaaaccagcggggttctggcttgtggctgaggggatttcaattcagaagggttggaaagaaacaacagaggggaatgagggatcatgaccagtggagccacagaaaatttagttaggtgccaagaaggtatgacatggcctaagtttagttaacgatagtaaaagaggactctgaggcaatatgtaagcaagcatgctgtcaactcctggacaaattctagagcgcatgattaaacccatggtttgggaacacttgtgaaagaaagtagagatgaatgagaggcgggtgcatttgctgagaaggagctgtgccggtgtaccagtctcccttctgttctgcttttgcatagtgaccagttcaaggatcgctgcaaccatggtgtgcctgggttccagttgggcgtgtgatgagctatgggctggaaagcatagatttaggcaggtgccagctggcctcgtggtcctgtctgtcttggcagtgcccacagcagaacctttgtgggacattttcagatccttctgcttggccatcacccccacatctattgagacttcagaggtgtggccccagggagtcaattgagagcctgggctctgtgatggaaaggtatctggaagcatctaacaagctctcaatagttgaccttgacctgcttggcattttccacttttgatatggggtaaagacaagaacaggattcccagtggttagagtgttttctggagcaataccacctagatttgaattccagctctgctatttgctaacttctgccttggggcaagttaaatcttttccttgtgcctccattggctcattggtgaaatggagatactaataataacctcaaaggatgttgttactgttcaatgagctgtgcctggaaagatcctggcattcaggtaggtgttcaacaaatgctagcccttattaccgttaggaatgatagattcttgcacagcaagtgatcagctaaatatatgcccaaatgaaagtggctccatcttgctatagtgagttattcatccaaagaggtgttgctgcaggttgtcattgaagagaactattgtagaaagagtgtgactgtgttctccccgacaatacttctgacaccacgtaagagggttttcttcccccctactgataccaactagtttggacaccaactgggtgtcctacaatttaattcaattctgacactaactacccagagttagctcagaccccacaggttaagaactcagtcccacaagactgcccccattcaaatgccagccaccaatagggtgtcctgactatccacacttccacctgactgacagaacattcctacaacctcccctacacctccagataggatataataatttactagagtgatccacagaactcaaaagaacattttacttactattgacacttactattacatgttgattacagaggatataactcagaaacaggcagacggaagagacacacagggcaaggtatgagggatgcagggtggaggtgcagagtttccgggccctctcccagcaccttgacgtgttcaccaacccagaagccccccaaaccctattatttagggggttttatgaagatttcactacataggcatgattgttaaaccactggccattggtgattaaactcaacctccagcccctcttccctctgcagaggttgccgggtagagctgaaggttctaactctctaatcatggcttggtccttctggcaagcagctcccatgccgaagctatttacaggcccaccaagagttatctcactggaaaaaagacactcctatcgcccctaaaggacctctgtaccaaagaccaaatatctttctgtgagacaacagagagttcaagcaccaaatataaagtggagaagcactagatgatctctaaagtcttactggcacttggagaacaagtgtttgtatttgaacatgcggaatcaaaggggagttgagtaaaaggggctccagaattgacacaggaggaggactcagtgcagcaatctcatggggcgtggggacagaagacacatcccaaagcttcatgtgcctctcaagcccctgcttttgttttatgtgtactggggataggggaggttggtatggaatgatggagattatgggagaacagagtccatctaagccacttttgactctgcaactgggggagatgcagctggcctgggaaggaatcacaaacgtggtccagtactcagtttagagttgttggctttgcttccatatacctccctttctcatctcccaaatcctttgaggaagttggctggtgaaaatgtacttatgtaagtggggagggagagttgtgcaaagctaggaagaagctgagttctgcatcagaggtgacatgagaaagaaccaggaaagcactgtggagaggaggatgacccatcaactgactcatctgggggacaggatctgggagccagaggtgatggagaaaactaaagccctcctcctggcccccagtgggaatctgatggagcctggtggagagcctcacatttctacagggcacggtgtgggaggggcctggaggccttgtctctggatgcactaggctggcagttctgaagcttttcatcatcaggacccttttacatgcttaaaaaatattaaggatcctaagagctttggtgtatatgggttatatctattaacagttaccattttagagattagaactaagaatggtaaaaatatttaatttgaatttacttattttaaaataataatacatccattagttgctaacaaaaataacatatttttttgaaaaacaattatgcgtggcaaaaagtatattgggagaagtggtattgttttacatttttcacaaatctctaatgtccagctttagaaaggcacctagaatctcattgctacctcggcattcagactgttttaacaatgcatgttacatgacctctggaacattccattgcactctcataagagaatgaaaatgaaaaaggcaaataatgtcttagtattattatgaacagagttttgactttgcaagcctccactttgagaactgctacactggactgtagtgaatttctccatgtctctctgatctttctttggtcattttctttcccttccatgtgacagggcaatggctggtgaggtacaggaaggtggcactttgctcaaacagtgtcttcttaaatatttcatagaattcaaactcccccaaacacaagaccaattcaaagaatactggatattctcacataacagcctgtgctgccaatgaacaataaaataaatgcagtttgcaatgccctgacccaaggagtttaagataaattttggatgagttgttgatttagaggaggagctggtatcacttcagtaagtcacagaaaataagattatattaatatttatattgcattattttaaatctgcataatgctgagtcttcactgtgaagaaggaagcccctcacaatgattagtgaggggtagggagggagaatggcaagaagacaccaagttccttgcaggcaagcaaatagatacatcataaaagtgaagtgaaattccagtcctctgagatcttcataaatagaagaaaccctcatttctttcctcctctggttgcagcttggactgatgagctgaagctctgtctgagacctggcactgttaggatgtcccccagggttctttccaccccagttctggagctcaggtggccccttgcctctgaattccaccgctttgtctgagttctggaggacggcacatgggagaaccatccaggtgcacctctccaggtatgagtcactagtccatgagaggacaataataaatgatggaagcactagacactcattagcagagtggtttattaagaactgatgaaggttctctgctcccaggcagatattattgcaaaaaaacacgtaggcacagggtctaactccatcatgcctaaattcccattatttcatgcttatcccgtgcataaagttctgtgagcagcagacagttgtggcatttgctagaaggccagtctttattgacaggaggagaacatctatctcaagcaaatgaaggtcatcattaataatttatgggacagtgggggttaggcatcctcacatactaatttttctagaggaacatggccttttcccctgcagggattgtttgggtattctgagtttctgtgtattttagtcccaaattcaggtgcatggaaaccattgacaaaatagaccctttaaatcagactccaagttgggacttcctttcttatttttcttccttttttaacttaaatttttgagataattgtagattcacatgaagctttacgaaataatacagagacattccgtgccccctctacctaatgtccccaatggtaatatttaatattttgcaaaactatagtacaatattacaattaagactttcttaaaagactcacatgaggacctttgagacttccctgaccccagaaggaaaaaattccagggaatgatgagctgcctgcctttggaaggaaggtccaccaggtaagaaactggaggccacagggatacctctgggctccctggctggaattggcagatgctggtgcagatgccagggcctcccctcagaactccaacctgcatgagggcacctgggttccagggatgcaacgcagctccctgcctggcccctgtggctttgagtggctgtgtccctcagcccttcacagctggctctgcccctcagcccttcacagctggctctgcccctcagcccttcacagctggctctgtccctcagcccttcacagctggctctgctgagttctgtggttgagatgccaggtactggaacacacagctccaggcttgagtcctagcccctcactttacagatggccttggccagttacctcttacagcctcagtttttcatagtaacttagatagcacttaccatatgtcactatcctaggaaatttacataaaaatttgtttcatgccaaaactctatggaaagatactattatcagtttcgttttgcaaacgaggaaacaggcacagaaaggttattcgtccaaagtcacccagcttgtgaacagcacagctggaatttgaacccaaacagtgcacatcccaagtccacatacttagccactgtcctctgttgcttctcatcatctgtgaggcaggttcaggagtatctcatttttttttccaaggcaaactaattagtacagtgcctggcacagaataaataagcacccatacatgccagataacattgtcagtataacttctggaagtttctgagtattcatgacttattcttttttttttttttttttttttttttttgagacagagtcttgctctgttacccaggctggagtgccgtggcgcgatctcggctcactgcaagctccgcctcccgggttcacgccattcttctgcctcagcctcctgagcagctgggactacaggcggctaccaccacgcccggctatgattttttctattttttagtagagacagggtttcaccgtgttagccaggatggtctcgatctcctgacctcgtgatctgcccacctcggcctcccaaagtgctgggattacaggtgtgagccaccacgcccggccgactttttcttgttactaacaatagctctttttccctgatcctctccctcctcctacctcccgccctccaataggcctcagtgtgtgttgttcccctctttgtgtccatgtgttttcatcatttagctcccacttataagtgagaatatacagtatttagttttgtgtccctgtgttagtttgctaaggataatatttggcctccagctccatccatgtccctgcaaaggacatgatctccttcctttttatggctgcataatattccatgacgtatacgtaccacattttctttaataatgggtactagacttaatacctgggtgatgaaataatctgcacaacaaactcccttgacacaagtgtacctatgtaacaaacctgaacgtgtaccctgcaacttaaaatgaaagttaagaaaaaaacacacacacaaaacaaacaaaaaaaactatagttgccattttaaacacctatgatgtgtcaaacattccttcagccctcccaactatccagaaagagtccttcttttatagatgaaaaaactaagaatcaaagagatgaaatcgggcagagtagagacaggattcaaacccaagatctgcatcttggactcacaacactggaagaaacttcagacaccagcctaacttcacacccagctcaggactggccctgccgaatggtcactcacctgctctgaaaatcctcgcgacaggacgctcacttcctacaccggtagttctctggctcgaggtgtgccacagaatcccctacgcattgttagaacacagaacattgctacccccaccccgtgcagggcttctggcgtggtggggctgggacaggggcctgagagtgtgcatttctcacaagctgccacaggatcctgatgctgctggcccagggaccacacttggacagtcatcgttctaggaaaacttcctggagtgggaatggtaaaggtgatggcttcttcccattttgcccttttcaaatctgagataggcttccccagcaggctcagtgccagagtccataccctcaatttaaataacaaatcctcctctatatcatgacctttcctccagagggttgtttttcattttttgttttttgttttttttttgagacggagtcttgttctatcaccaggctggagtgcagtggcacaatctcggctcactgcaagctccgaaccccgggttcacgccattctcctgcctcagcctcctgagtagctgggaccacaggtgcccaccaccacgcctggctaattttttgtatttttagtagagacggggtttcaccatgttagccaggatggtcttgatctcctgacctcgtgatccaccagcctcggcctcccaaagtgctgggattacaggagtgagccaccgcgcccggcccagaggggtttttaagattgtgtgttctgaatggcctgtctctgactggaacccaactccgtccccagacccacttccatctttttctgtgagggggacacactctttcaacttttccaaaatggcatctaccatggcttttctgattaaaagcaaacgaaacacacccttcctataatcaaaaatttagaaaagcagcaaaaataaaaaggggataaggaagaaaacagaaattaaccaccatcccaccgctaaaattttgatgagttctcatgtgtttccttgcagctgattgttgtttggcatacatttattaatattggaattaaaaatatatatggcactttatatcctagaaaatagtaatactgtaaatgtgttctagaaatgggagctgctgttgctcttattagagaattcaaacaaagaagggaggctcgctggggacagcttctgggggaggatgggtaccgctttgagacaacagggagaactcaggcacagaggtgacgatcatcgttctctgtggggcacatagtgatgcagccggaaacaggtatgagtcagttgagtggggacaggtaatagagagctagaactggctggccttatggcctccaaggcattggggagccactgtacattcttgagcaggcaatgacttcacaaaaggatttctcaaaggttagtcctgcaacagaagacagcgtggattggactggaagagtgggagggcaggtggagaaggcattgtgctgcaagtggggagcagccctgggggcccagccagtcccctgtgccctgacaagtggtatggcatggatggatggctctacttctgggccgccaggatggacaggtactggttgctcttcaccatggcgataatgaggaggccaccggtcagcaggaaggtgggccagaagagggagaagaggagggcctggggcccgtagaggcgctggaataggacgctggtttcgttcccccgaggtgcggagaagcagtagaagacctgctgctcttggaatttggctctgaccttctccacgtcggcccgggccgtctggtaattgtccacgctgcctgggatgtaggagcactgtggggagaaacaagagcagctgtgggcttggaaatccccatttcttagccaagggcttgatatggagtaaagaaaaataccagctttgtagtcgggcccctggattggagtcggggctttggtctaaagcttggcaggccatgcgctgtacaggtctggagagcacgctctcatttgtgtcttgtgtgtggatggcggtgctggagctgctcggggtacaggctacacacctgggcgcaggtcctaccttggagtcctggctctgcttggattggctgtagaatttttggcaaatttctcactctttctgagccctgaagcttcatcacttaaatgggtgaatatcggtttcaaaggatattatgaaagaaggacttcacacagagctatctaaggaaaccagggagggacacaggccaagtgggctgtgtatttgaaatcgagatcatgtgctcaattgcctacagggctcatgaaggtattgtcagagggtgaagcaggcaaagcaatgagatgacaggtgcccactgactcttgccttggtgccaggaagaattgccagggtgtggcagggcctgtcaatagggagagagccagctgcctccagacaggcagtcaccactccctccaggcaatggatgtcaggccatccagaagatctataatagccagacctccaacactttaagagaagttagaaaccagatcacacctgtaatcctaacactttgggaagccgaaggggaaggatcccttgagcccaggagttcgagactagcctaggcaacatagcaagactttatctctacaaaaaaagttaaaaattatccaggtgggcatggtggtgtacctgtagtcccagctacacaggagactgaggtgggaggatcacctgagcccaggagttggaggctgcagtgagctatgatctcgcaactacactccaggtaaggcaacaaagcgagatcccatttcaaaaaaaaaaaaaaagtaaaatattagctaaatttaaaattgaaaacctttgcagtttcaacctgtgtacagcaaacaaactatgttggcaagcgggtatttgacactgggatccaaaggaaagaaagaatgcattgaaaagagttttgtgccagcagagcatgacacacatttaattctgacgttgattattgttattaggaactttctgccctgttcagatgaggccagctggaaagtgatgcaaagcagtcataaagcggagttttatctggttttatctctgttctgagctgcaagtgtggtgcccccatctgcagcagaatacctacagggcccccatagcccaggtccctacccactctgcatcactgagggcgagacccaggaatgtgtgattccttcatgcacttaattttgccctagtgaaatcatgtgcaagatcaaaatgtgtaaaactgagacccaaatggcaggtgttgagccagattccttgcaggcctcggccactccctggatttatatgaggtgccaccctggaagctgcctgccctgagggcattcactccagcaacacagaggagggttgcactgtagttctcacagcctgggaaatgcagatgctgcactcagatctagggccccagccagccagggagtagctgaggctggggagacgctggctcctcaggaatctggcattcagagctgttggacactgccaggtcctcagtagcatataatccagcatcctgagctgacggtgagggggcctggcctgagtctctccaatgcctctgactgtgaccttggctaacctagctccttaaatagcagtgtggctatggagtcagacaggcctgagttctgagctgtgtgaccttggcaactgccacaacctcactgggccttgtaaaatgggtttgtgaggctacctgcctaggagaactgtcatggggattaaatgagatgatgcatgtaaagcactgagcacagaagcccagcacacgataagaactcaaaaaagtggaagatgctattattaataataatatgttttgacttatctatgaaattgcaacaacagctccttctttaccttcttaaaaagaggtctatggatgagctctgaagtagaggcttctgtccatcctgggcctagtgtatcctctgcctgctcagggttcctctggatcttttatgctgggcctgtttggcaagacactgggcaggaattcactcttcatggccaaacccagaagccggggcctgaatgcatcctttctctcctgtcctgggtccagctaagcctgagttatctgaatgatctgaaaccaaccagctttttcccaagccctgcagtgtaaggtccccaggacagacaatgggagggaatttagaactcacctgctccaggctaagactcacaggaaaagctgagggcagactatggcccctaccttcagagttggagggtgggatgagagtcttcttggcccttcacagtgattccagaggacacccagctagcctggagccccagccacttgaacccctatgatggacataggcggaaggagcagctagcccacaacccagctgcttggcaaaaacacgaagggcatttccactgcttcctcccagctcctgcagcctgctatcagcaccacacctggtcaagcctgggcggcaggggagaggacagcagtggctccagcatgtccttccttcacatcctgctgacagttcattcaggggatgctcctctgagctggcaatctcaggaccagggaggcagcctgaaaaccagcctgctctggcccatatcactcccggagaatgttaccagttattgaaaatttgtttcttgcattgggataaatcaagggctactgaatgccaacgcagaggcaggggtcatgggtaggagctgcctccagtgggccctgagacctctctccaccgggtggggccgagtcatactagcgatgacagaacacctgaccatcctgcactgcccagacccacttctcattgaccttcagcactctcaagatcccccagcctccacgccccatcccaggcaccctgccccttcccgtcccatcagccatcaagtccggactgtcagcatctcccctgctgcaggccacatcttggtcgtgagtgcttgctgcggccttggctcctctgtctagtaactggacccacacacctgtaggctccatcttcccagcccaactctgaaactctgatcatgccctaaagattcccattgccaacagcaataatttccaaccttagaatcaccttgggagctccatgaatggatctctgaccagagattccaccttgatatgtctagtgttggaccctagttttgttttttaagactcttacagggttctaatgcatagccaaagttgacatatcttgagacatacacactcacattttaattccatattgtggtgatcaaaggcctctgggaacagaccttagtctgccctgacagccttttccagctgcatacaccccatcatgggtcattttctgtagtcagccctctgatccctgtctccacctagcccttccctccgccatgcctcgtcctataggcatacccgcttcctatatcacctcattctctatgccttgcatcctgcgcctgcctgatgttaaaagcctaatccaagagcctttcttttttttttttttttttttgagatggagtttcactcttgttgccaggctggagtgcaatggtgcaatctcaccaagagcctttctgatacccccatcattgtcagctggaaaacatccccctcctctaacccctgtaacttcctctgttcttctccccggtgccaattcttccctgctaggcactgttcatgcatgagctctctcctcttgagtcctacaggcttgacacaggaggtgctcaatggctgttgaataaataaatgagaggaggaaagaaggaaacaaggaaggaaggaaggaaggaaggaagggagggagagagggagggaaggagggaggggaaaaaaaagaaaagaaagaaggagggaagaaagggaaaaaagaaggaaagaaagaaggaaggaagagagacagaatatgggccaactgatcgctttaggaaaggatatggtggtgagttttgtgttttggagggggagggtgggatgttgggatgcaaggatggaaaaaccatctaaatgtttgtttatggaggttactccagccctgagtccctggtttcctggggagtcaccgggattccactttgaggatctggccctgggcctggtccctcatttgactgaggttgtagaatgaaagtactaacactaatcactgcttttgtttgagtgcccactatccactcagcatcaagcgtggcactttatatacagcgtctctgacttgataacagctcttcaaggtgcagcattagcattccactttacaagggtggaaactgaggaggtgagaggctaagtggcctgcctatgtttacacagccagttagcggcagattcaaacccaggtctgtgtgactccaacacagaagagctagggctggctcagtctcattccagctgtgagacctggtcaagtgggttgatctttctcagcctcggggacagggacagttaggaacaggctcacacacctgacagggataaagggatgtgtccccatccctccagttcagtacctgctggttctggtcccgagtgtcctccgtgtggtacagcacagcccacctgccggcagctgacacgttgacccacaggcatgggtactggggcaccttcttgcccttcagctcctcctggtccctgatgttggtctcaatcaggtggcacttggattcctgggtccacacgctgaggagaccacacacatgcacacatacacatctcagaactgggtgacacacagaacacccatttgaacccattatcccctgggagcctctagagggatccaggactgggatcctcatcttgtcttcagcatccagcaataaaggcacatgaccccacagtccccggacacagggaggaattgtagaagctggatggggtcttagacattatctatatgactggttctcaaccttggctactcttgcaacaacctggggagcttctaaaaagattcccgtgtccaagctacaccccagagcaagtgaatcagaacttcttgggtggtttggcccaggccctgggtgttttttcaaagctccctgatgtgattctgacgagcagccaaacctgagactttcttatccatatcgtcttcattttgcagaggcagaagagaaactcagaaaggtcaagtgactttgctgagaccttgcaggacctgaagctaggtctgagtgggttggagagctgtgttctttcccctaaaaggagcagatgtagaaggggtttgagttgagccaggatgggaaagatggtggggacagtctctagatggtgcttcaccagattaagagtccagcctggaatcgcttcagcgttgtgaagagtgaggctgcagcaggcccgggagaggctaacaggttcatcaacatattagtaaatcagttgtgcttcaactcccaagtatcctgtgggagacccattgccagtcagaagggggctgtcagctgctggaacgtgcccagagcacaggtctgagacttatcctaaggacaggctgggggaactgagtgtctttgttccaaatagaacacgaattaggaattcacagcttttccttaaaatctcaagtggttgatatgtcatggagcaagggcatggaccattctctgagattcctgagcagaacttcagggaagcagatgctggctcaatgcagacacatcagaaaacctcaaacatgaaatgtatgttcagtgaggcaaggagctccccgtctcttgaggtattcatcaggaggctggatgcccacctgacagggaggcttcagaggggagagaattatgcagctgagctgtaaacatctgcaattctctgattcctcctgggatcaaacttgcactggaacctttgctctgattctttgctatttcttctgagaagggcatcatgtgtctgttaccaccacgtcctagatcatgtgtctgttaccaccaggtcctagaatctcagaccagtggggctcagttcatcctaccttccctgcacttgaaccctagaacctaagaatgagcatcgtcttgaccctgctgccttgaatgagggtcaaggagaggggtgagtagaaggccagggttccttacagatgccagacccttaggagagggttggggggtgggcaggccgggagagctcagtaccttttctggtagaggggcagcacagtcgtgaccaggatgtagtaggtgatgacggcacacaccaccatggttacacccaggcaaagggctcgtgtctctccccgcttctgggccatcaccagcttcttcaccatattcactgggggcagtgatcatttctaggtccacagaagcaaacagaagtgagatcagcccagttcacaggtgatccacagaaagagaggacaggtgagaggggaaggtactcaactattaatatcactcttgtttatatttggagctttgcaacttccagaagtcttgctttttggaccccatgtaagccttccctgtgcaattgagaggcaattgcagataaaagacctacggctcagagaggtaaagtgacttgccctaggtcacacagtatgtaataggctcagtaatggccccccaagatgtctatgttctagtctctggaagctatcaatgttactttatgtggcaatgactttgcagaaatgattaagataaaggctcttgaaggccaggtgcggtggctcatgcctgaaatcccagcactttcggagaccgaggtgggcggatcatgaggtcaggagatcaagaccatcctggctaacatggtgaaaccccatctctactaaaaaaaaaaaatacaaaaaattagccgggtgtggtcgtgggagccagtagtcccagctacaggggaggctgaggcaggagaatggcatgaacccaggaggcggagcttgcagtgagcagagatgcgccactgcactccagcctgggcaacaaagcaagactccgtcaaaaaaaaaaacaaaaaacaaaaaaagataaaggctcttgaaatggggagacaatattggattatccatgtagctcctaaatgtaatcccaagggtcctaataagagggaagtgaagggagattaaacagatgagaaagctaaggtgatatgaccagggagacagcaattagagtgatgtgaccacaggccaaggagtgcgtcagaagctggcgggggcaaggaacaatggctcatcccccacggccactgcagggagtgcagcctgcagacaccttggtgattttggacttctggtgaaatttctgtcgtttgaggccgtcaggtttatgatcatttgctacaacagtcataggtcccatgcggtgagcgagcagtacatgtgcatcatccatgcacctccttccacggcacttatctcacagggatacttggagtatttctgcccagaaacagttctgtggcagggctagctgggccgggcacaggcagggaaaggagaggagggccccagaaggcagctgcaggttgtcaggagaggcaggaggtttaccatattccggtgttttttttttttgtaaggaacattcccctacttcaagcaaagaaagaagaaagaaggcatcatggtggcctcagcgactgctttcttatttcagggcttgaagccacctgggacaaagcagaatgggcacattctgctggtggttgctttccttctctcctctttctttaggcagcaactccttgtttttcccctggacattgactccaccccaatgcaagcaaagattccaccctcccctgctaggctcctgatcgctcccccaggagtgtgagtcttgacaaagacttcaagaaacagcccctcaatctatgccgcctggagccacagagatgcccagccatggtccccgcgtgatttcccatggttccgcaagctgtcctagagcctctggtaaatttatttgctgttgtttttatttgtttaaagtaaccagagtccatttctaccaaaaataccaggaagctatcaatgtaatcctccattttaggggaaattttaggggaatttaggggaaattttagccagatatcagggggactttattctccttgccaggtccctaaagtaataaacatattatggtttttgtttgtttaattagccagtgtccgggtgacaggccttagtccaaagagattttctgcaaagtgctctattttctgctcaggcgtctcttaactactagactgtttcaaatattcagagattcttgactccctccccttagccaggctgccctcatacccgggcatctccgctaaagggaagagaccagggtcaggcaccacggatacccatcacaccttcccagtgagctggtccacctcccctatcgatcggcagaggtgacatccaatgacaactttttctcctttatttggcaccaggaggtgagtttctcctgcattctaatggagacattataaaagcacaagcaagcagaaattgcccccgacaaagagagatgttttattcaactctttttattcaatccttttcctcctgttctgtgatcttgtgggaatgggagagcccatgcctttttctacctggcgtcagttgaacaagactctccatgtattcacaggtaaagcaacagaatcacctggaggtaagctaaaagccccaacagcctgcttccccaggacctgcaagggtcactggcacttggccccaccccagatactgtgagacataaatcatttgaagccaatgggaaatcccatcttggaagcctagggctgagtgcccacaacaaagccatttctctcctgggggaactggatcgcacctgtgggggcttcctgtggctccttcctggctaatcagccccccccagcgcccagggccatggcctcctctgctatttggcttctagtgccctctcaggcccctgggcactcctgaggctggtgaaggcaggaacctggttttaccagttttaggagctcagaaggaaaggaaaggagaggcttccctgtcacagagaagtctggaaacttggcttattcaggtctgacccgtctctaatggtctgatgagattgttgcctgcactgagtgagtttatagagtcatgataaatcctcctaagaccatgcgtggggttcagtgtagatatgacttcagcaagaagttagtattcagcatccaaagggagaacctttggcgggaggaaggatgggaactgtcaatatcccccaagggacagaaagaaaaggaagaagtgggtttcagctatcataggagggatttcagttagactgtaagaagaacttcccagttttgagcatttctaaatatctctgaagttccaggatatatcttcccatttagaaaggtcacttgagatctgggatagattcagagaagatggagaaggacaaaggaaggcaggactttggagtgtcctgggtgacctgatagctgggtcgacatccttttccttagaaggacaaggaatagagtacattgttgaacagtttggtggggtgtggacagggcgattctgaggtcctcagacatggaatcaaatcctggctctgccacttacacttagcaaccacatgactgtgaaacgagaaccatggtacctgcctcagagagttcagctaaagatcaaatgccatattgagtatcagacatgtatcatagcacctagccccaaatcagcccccagtaaatattagctattactactaacgaaggaaaccctgaaagtttggagcagaagtctggacccctcttgatgaatctatttttgtcccacctctctaccggtgacaagtgccagcattggtgttaatctccaggctgcagccttctggccactctgagaactgggacctagagggccagggcgcttactaccagagtaacctggccactgtgccaccctccccactggccaccagaccacgggccctccatccagaaggacagccccgagaggaagggagtcctcctgcctgcctccctccctgccccgtggcaggctgctttcccctgtctccctccagcccggtcttcagagaaatcacttcccaagtgctttcaggcccggtactcacagtcttcccggcgtcctgtgggtcttgagcagcagacagtttctttctgcctggacccccgcccccaccccaaaagaggccacagagcttcagcaggaagtttggcctccccgcccgtctccagggaagcagcttttggtccccatctggggcaagcctccatgcccaaacatggtcaagtctgagcacacagcctggagacacagactcggagagcaggtacccagccctgaggaaggcagctgttacccaagccctgcacctccatcttcccagagtctcgtgggaaacagatttcaaacaacaacagacagcaagactgagaaactacgaaagatcagcctggtatatttggaaatatttcttcttctctctgtctctgtgggctggcaaagatgccagaaataggaaatgattctccttttgttggcatgaggaagggtggagttgggctggaggggttgggcttgtcactagtccctggcatatccacgctggagcagctacagctccctgcctttggcacttacgtgctgtgtgaccctgagcaagttatggcacctctctgggcctcagtttccttttttgtttttggttttactcccaaacttatcgttaaatgacctcagttttctcacttgtgttactggcatttttaaaacctactttgctttagggtagtgatgggagttagagacggtggggatttatggcaaggggagagaactgactttttaaggaccaactgagctgaagctgggagtagtgagagctccacaactgcttccaaccaggtccagggacagtctgctcaccaggggccctcccagagaccgcgaaagtacagagatttcttcctagcaataagacaagtgaatgtcagcatttgcaggcaaaaaacatgcttttagatctctgcttcttcatctgtaaagtggaagtaaggattaaaaatcagcaacaaagggcaggcacagtggcccacgcccataatcccagcactttgggatgccaaggtagatggattgctcaagcccaggagtttgagaccatcctgggcaacatggcgaaaccccatctctactaaaaatacaaaaattagtcgggcatagtggtgcatgcctgtggtcccagctacttgggaggctgaggcaggagaatcgcttgaacctgggaggcggaggttgcagtgagtcaagattgtgccactgcactctagcctgaacagagcgagaccccgtctcaaaaaaaaaaaacaaatatatatatatatatatatattttcaacaaaacaacaaaaacaatcccagatattggggctttcctaagtatcaggcgtggtggtagaaggcagcttatctccacccttcacttgacccaagaatcaaagaacctgaaactgagacttggaggcttgaagtcactggtgcaaccctaggggccagaactagattcgaagctggcccttccagatggcacagcttggtctgtctctgatgaccctggggctgctctgagacattaaaaatcacctcgatcatacagtaagctgccacctgaggctctggaggtcaccctgagtttccccagcccccagggaggtgggtgcagcctggccttccctgctgagcgagctcaccaccttcctccctcctgcctccagcaggcgcgaaatgaaggcagccactcaggcctccctgacacactctcaggcggtgagtgcccttctccacccctttcctaattgaatcttattaacaggagactacagtgtctgtttaatgggcaccatagcaccagagggtctaagaccagcttcagaccttgcaggcagattgacagagggatgtaggatctggaattcaatctcagaagagcaattttccaaggatgatcctctgtccactcagaagcaggaaaagtcctcctggggctaatccagaaatgccaggcccccctcctgcttccctgggggagagatacacagtgcaacaggctgccatttatgagtataaccgaagggctccttgctcgtgatactctgaataagttattaagggctacatattatttggaaatcataaacaaactttagcattcttcccaagggaaggtgggaacaaacagggaaggggggccgtggggtcttctgctccccctaaatgagccacaaccaaaaggcattgacaagccctgtcctcgagggtttgtgggtgaaaacccaggtcctttgctggctgcggggttgtgtgtgacagatggctacaggtggagggcaagaaaataacaatgctgcaacaataaatattgacggtttgcattagtacggggtgtcagagatcacaaaatatcttctctgactcttccaacagcttcttaaggtactagcacaataggctcacaatagaccactgaggtggagatttttctacccatttgatagagggagtaactgagcctcagagaggtgaaataaattgcccaagcaagttactttgcctctctaagcttcagtttgtctgtctctaaaatagagataattatacctagcccctcagtgtttttgaggaatgagagatcacctaagctacctgacacatagtatggagattgtcctttccaaagatggtcacaccaaatacttcccattccatgtgcccttttcacagtgtggcatcaacactccaccatcaagaggggcattgatgtctcttccccttcaccctgggtggagcttcgtaagggcctcaatagtagaatatggtagaaggacacagcacgatgttcaaggctaagtcatagacgggggctcgagttccccccacacgctctcgggacatgtacctgggaaccagccaccatgttgtaggaagccgaggccccgtgctccagctgacagcctcagctcagatctcagccaacagctagcaaatctcaccgggcatgggagagaacaagcctgcagacagttccagcccccagcctgccagcctcccagctgaggcctcagagaatgtggagcagagacagcccacctgctctgtgctctctctgaattccagagccacaaaatccacgagaagaaaaaaactaatgtttcatgcccctgcgttttggggtaatttgttatgcagtcatagtaactggaacacacttgcaagtgatttcaaagggggactgttacagttgctggtgatagtggtaggattaaaccagtgagaattaaaacacctgagattgctatatggagtgttacaggagagtttagaaatgctttatctaggtagggcatggtggctcatgcctgtaatcctagcacttttcgagaccaaggcaggcggttcatttgaggccagtagttcgagaccagcctggccaacatggcgaaaccccgtttctactaaaaatacaaaaattagctgggcacgatggcaggtgcctataatcccagctattctgggaagccgaggcatgaaaatcacttgaatccaggaggcggaggtcgcagtgagctgagattgagccactgtactccagcctgggcgacagagtgagactccatctaaaccaaaacaaacaaacaaaaaaagtgctttatctactcttaggtcacacactatggcacaaatggaatagaagggcagtgatatgggagggtatttttgtttatgaagcacctactatgtaccagggaatgaccacatagatatgcaatacatacacatacacatacacatggacattcctctccacaatcccccacaaaaggccttgttctttctgtaaaagcacaaggcaaagtgattttcccaaggtcacgcccctagcgtgtgatgtgatggagcctggagtgcacctgtgcccgctgactccacagcccgtccctgcccctctgtcaccccatgactcccttgggagcagttttcaagagaccccaggtttcttcatgatgtctgcttccactgctttccagacaccctcagctcagtctgtacccctctctggattatgcacctgcttgtttatttaagtctttctgaatcaatatctcctctctgctgacacttgggataataagtcccataaatcaaattggcaactgagtcttgagcccctgtgtgtgcctctctgagtgctgcagggatgggtgttagtcactctcagtcctagcgaagctgtgcgttcacagacatcccagcacttgctatgcagaggctctggatacaccactgtgccgaggtgactcagacacggtcccttcactgcagaaaagcgatgccagatttcctcaactacaaaaatacagaacagaaagtgaaagatgtgttttaaatgagagacagtaataaaaggcagaggaaataacggtgggaggttttttagtagagttgagatgacaaagtataacaacagcaaaagtaaatgccgatattacaattaaatggtcacacaacaagacacgacaaaaaacatggtaaagttgttccctgctgtgtagggtgatactcactcctttttcctctgactcttttcaccatattttcccttggcctgatttttcttcctttatcctgccatgctgttaacataattgtaagcaccttgaaaatcctctttgagacaaagaggagcataaataaataaacagccctgctgtctgtctgtgtggtaaggttggtttttttaaaaaaatgctttttccttagtgcaaatcatcccagctctgtgggaaagtggcatgatgtggaagtgcagggagaagatgaggtacagtgttagcctcactgctcagagagagttgctgtaagagtggtggtggccttttcaacacacataaaggaagcatgtgccctctccttccatggcacatgtctcctctgtccttgcctcctggccagctcttcctcttccacaggactccccgctggggccttccctcgcccccagccccttagccactctccgcgcctcctgggccaggcggaagctctgcttccgcatgctgggagcaccgcatgcctcttctgcagaacacttcctccgcctgtaatttaacatttattcatgtgcatcctccattaacatgtctcctaacccaagggtaagctctctaaaatcagggactggaaccgttcttattcactgccgcatctctagcgccaggaggaataaacaaagatcttgcggttttgttgtcatcgtgctttggttttcgggaaaaaaaatctctcgcttttttacataacagaatattataatcattttcccatgccatgaaacatttttcttctttaaattgatatattatagtttcacagttgtacataaaacacttttctttcttgaattttaattatagattcgggggatacacgtgcaggtttgttgtgagggtgtaatgcgtgatgctgacgtttgagcttctattgatcccatcactgatagagtgaacatagtacccaaaaagaagattttcagcctttgccccactccctccttccttttggagtccccagtatctattattcctgtctttatgtctgtgtctacccggggattagctcccacttagaagtgagaacatgtgatatttggttttctgtttccgcattaatttgcttagcataatggcctccagctgtatccatcttgctgtaaaggacatgatttcatcctttgttatggctgtgtaatattccaaggtgtatacgtagcacactgtctttatctaatctgctgttgttgggcaccaaggttgtttccacacctttgctattgtgaatagtgcggcaataaatgtacaagtgcaggtctctttatggtagaatactttattttcctttgtgtatgcatccagcagtgggattgctgggtcaaatgatggttctatttttagttatttaagaaatctccaaagtgctttccacaggggctaaattaatttatatttccaccaacagtgtaaaagcattcccttttctctgcagccttgccagcatctgttatttttttactttttagtaatagctattctgactggtacgaggtgacatctcattgtggtttaatttgcatttctctgatgattagtgatgctgagcatttcaaaaacatttttctagaaaggctatacagttttctaggttatggctaagtcgggatagatttcatcaaagccatgttgtcagatatttaagaagggtacttgcttccctgcatgcttgtttgtgtttagcggaaggcagagtccgcctctgctatgggcagacctgttttattctctacccctgaaccacacccatgcccagatgtcatttttcatgaatggacaggtataagggagactgtatctataagcacaaagtttggggaccagaacaggtggatagagatggcaacatcatagaagtgggagatggtgacaggttggcaattgctcaaccctgtcccaggcctgacttgagccttagtgagtgagagagagcaagagagagaaagctgttgttagggcttgtgggactcagaacacaagaaatgccactttgggacctacgaagagggtgtttccacttctgcttagctgtggccttgggcagtggccctgacagataatggccatcattatcatctaaaatagctgcagcaaaggtagactcctgtgtgaatcggtgtccctaggtgtgctgcagctggctcacactggcaccgtgagagcctttgcaagccaagtgttcaaccatcaggagctgaaaatccaccacagtgatgggagtagctatactgtggaaatctacaaacaatacacatcagggcttttgtctttttggagagctgttttgccagcacaccactttagaggatacacttcaactgggaaacctgaggaggtattaggaatgaaggtgtggacaggttataggaaaccacagggaacagtgacctaggggctcgcaatgttggttgagggctgagggaagggagctctgtccaggatcagcaggagaatcttcttgagaggggatgctcccagcctggggagaccctcagggaaggaactggggaatggactgctatgctcactctcctggaatgtgttgatgaaaaagccaaactctgcaaattatttgaagagatttgttctgagccaaatgtgaggaccatgacctgtgacaaggcttcagaaagttctgagaacatgtgtccatggtggttgaattacagcttgattttataaatgttaaggagacagaagctacaggcagacatcaatgaatacacataagatttacattggttcagcccagaaaggcaggacatctcaaatggggatggattcaaagatttcctggtggattcaaagattcaaaggtggattcaaagatttcctgaatagcaattggttgaaataattaagttttgcctaaagagttgaagtcaacagaaagaaccacgaaggggggttatggaaactaaggttattattatatagatgaagcctccaggtagcaggcttcagaaagaataaatgataaatgtctcttaccagaccttagaaggtctgattagactcttagttaaatctctctgggatgagaaaaagacttagaaagggaaggggagtctctgcagaatgtagattttccccacaaatgacaactttgcaggactatttcaaaatatgtcaaataaatatagtttggggttaaaatacttgtttctttcagagcctgctatctgtcatgtgatgctatactacagtcaggttggaatttggtatttattactacaaagagtctgtttgtcatcttaagacctctgttttaatgttaatgctggtaagttgtgcctgaataccaaagggaggaaggtattttattaagaggcatgtccaacatcccctccccattatggcctgaactagtttttcaggtttctttgaaatccccttggccaagaggtgggatccattcagtcaatcaagcggcttagcattctatttttggcgtacagacccttctgcagacacctgatctcctttggttgaatccaactggtagacagacaaagagcttgttgctgcagtccccagtgatcagtttccagggcagagccagctagagagtgaggaggggtcaggaggggcttacatagatatcagtccatctccctgtgtatgtggctttgggacaggaaaactaggtaagagcaaaaaaagagggcttgagcacatggggactccctgcaaatcccccagaaatatttgtaggggtctgaaaggtatgtaggtagggactctaaacatttgtaagtcaaattttatgtggctaatttggagccccaggctggtaagagctcaggaaactcaggttccataaacagtgcctcattaaatattctttgcataaaataggttgatgaaaagagtcaaactctgtaaaatatttgaagatatttattctaagccaaatatgagtgaccaatggcccatgatgcagccctcaggagaccttgagaatatgtgcccaaggtggtcagggcacatcttggttttatacatttttgggagacatcaatcaaatacatttaagagatggcttggttcagtccagaaaggtgggacaacttgaagagggggctgccaggttataggtagatttaaacattttctgattggcaattggttgaaagagttataatctatagaaagggatgttggggttataataagaggttgtggagactgaagttttatgatgcagatgaagcctccaggaagcaggcttcagagagaatagattgtagatgtttcttatcagacttaaggtttgtgttgacgttaaatgctggtcagcttttcctgaaatccaaaagggaggagggcataatgaggcatatctggacccctctttccatcatgacctgaaccagtttttcaggttacttttggaatgccctggtgagagaagggatccattcagatggttgggaggaccttaaaattttatttttggtttacgaatgtttgcacactttttgttatttccctagaataaagactggacctccaagccaaaattctagggcaaaaggtttctacatttttaagattttggtatatatttcacaccttttaccagaataccgataccaattcttgtactcactgctggtagaggagactggttaatttcacacataatcaccaattcttaacactcttaaatttggaaatatgtgtcttttggctaggtgaaaactctttcatctgtttttaaatttgctttctttagattactagcaagattgtacagtcctttatatgttcattggaagtgaaatattttatttgtcccaaattgtgatcaggaataaataagaagcccctgttttagaccattctaactgtcctttttctctggcaagattcagaggcccaatcttcatcagctgctctaagtggttcaggtcaggaccggctccaggggctgaatgccccaccccaatccctcccagcctctcagcatgggcagggggttttgagattataaacaggttattctgtaaactttctttgctgagccatagaatgtcagccctctaagggcccttagaggtcatctaggcttgttgctggaaaagagggtcctgatccagacacctagagtggattcttggatctcacgcaggaaataattcaaggagagtcacagaggacagcgaaagaagcaagtttattggaaactactttgttacagagtagggcatcctcagcaggaggaggagcatgccatcctttgtgagtgtgtctacttgcaagaaattagaaggagctctacacttggaatgtgtagatgtgcttaccaaaggtaagggctattggtgttatcaatgaccatgaatcttttaccctaagcctgctaaccgatgttatctttaagtaaaattggctgtactcttaagatatccggacattgtacaggcttgctgggagatgctctgtatggccataaatattacataattataagtggtggtcagcttagaatttggctattttcagaccattagcattaaccttaaacacgctttgtgaatgcctgcctgctcacttcaatatggagtcactctagtcgcattttattaaaccagaggcctggtaaacaggggtttctataacaggcctacatgaccactttgtccttgagtaatgttttctatttacaaagtaatagaggtaagtcatagagaacttgataatacagaaaagtaaaaaagggggaaaataaaaatcaatcaagattcaatatcctgaggaaaccacagtcaaaatattagtggattatgttctaaagattgatacaaatcctttctaaaaacaaacttaggaatatactatacaatttaaaatgtgttcttattttaaatagaaacactttccccatttatgtaatattgcttttcaaaataccagtacttcatggccctataatagtccatcatatagatatgtcataaaatgttttactatttcctcttctgagacatttaagctattttccaggttttgctattataaactactctccagtgatgatctgttcatgtcatctttgctcacctctctgattatttccttccaacaggttcctaaaagcatgatcagagccaaagaatattagccattaaaagcctctgcctcttctctttttctggaagcataggatctgataaaatacacacctctgttctgttggtgagccatgtgagctcagacaggtgcagtgatttgcccaaagccacatagctttgttagaccagggattggaattcaggcctgtctcgacagcctctcgtgagtgccagaacccagccaggagtccatgcttcctgactcctatgccatattcttgccttattccttgcattagtccgttttcacactgctataaagatactacccaagactgggtaatttataagcaccagaggtttaattgactcacagttctgcatggctagggaggcctcaggaaacttacaatcacggaggaaggagaaggggaagcaggcacctcttcacaaggtggcaggaaaaagagagagaagcccaggggaaattaccatttataagaccatcagatctcatgagaactcccttactatcatgagaacagcatgggggagacttcccccatgatccaatcaccccccaccaggtccctccctcaacacctgggtattacaattcaagatgagatttgggtggggacacagagcctagccatatcattcctctttgtagaatatttctccactagtgagaactctcaattactgatcaccaacatgtgccaagaactgtgctaagtacttgaactgcagtatctcatttgatcctgaccctttgaagtggttactgtggttatcctaattttatagatggggacactgaggtggaaacacagcatttcttgtccaaggtcatgatgttagtaccttagagccgaaacccccattccttcttgtctgagcagtgtggtccaaacagaactttctgtggtggtggaaatgttctataactttaagccattcgatacaatagccactagctacctatggctgttgagcacttaaatgtgaacagtgtaagtggagaactaaacttttaaccttaattaatgtaaatggaaatagccacatgtaactagtgatattggataggtatctctggagccttaagtttccctgttccctccatcatagcctgactcaggcagctctgaagagggctcccctaccatccttggacctcagcctggggtgggactcagaatagccctcctaacacgccttgctaatcctgagccagagactctctctgagccaggaccttgtgcctgagacagattcttcagctgcctacagggctggcagtcccaggagctacttcctgtgggcatttacaaagacacactgcagagagaggctttttaatccccttttgttacacattaatgaaaatgtatgtctgtaatccataaataataagattgctcctgcaaagctcaaggtctacatttacactcagagtgaatattattatgaacttcactagaatcttctctgggagttctcagcagagcaccatctcccagaagactctgtctctaaggagggaagtgaaggagcataaaaggactgattttttaaaaatcagcatttaatctgggcacggtggctcatgtctataatcccagcagtttgggaagccaagacgagaagattgcttgagcccaggagttctagaccagcctgggcaacatagtgagaccccatctctacaatttcttttaatgagccaggcatggtggcgcatgcctgtggtcccagctacttgagaggctgaggtgggaggatggcttgagcccaggaagtcaaggctgcagtaagccgtgatttcgccactgcactttagcttgagtgacgttgagactctgtcaaaaaaaaaaaaaaaatccctcataatttactgagtgccttcttcatgccaggccctgcactaggcctggcacatggctccctacggtactttcatagagttgctgtgacacaaatcactacaaactgggtgggtggtttaaagcaacagaaatgtatttcctcacagctctggaggccagaagttcaaaatcaagctgtcagcaggcccgtgctccctccaaaggctctaaggggaaaatccttccttgccttttccagcttctggtagtggcaggcactccttggcttgtggctgcagcactccaggctctgcctctgtcttcatgtggccttctcctgctctgtcagtggcttcttctctcctgtctctgataaagatacttactgttggatttagggcccacccaggtaatcaaagaagagctcaagatcctttgtttaataatgtctacaaagactctttttttcctaataagatcatattcaaggtaccagaaatttggacatggacatatcttttgtggggaccccattcaagtcactatactcatcttattcaatctatataacaactctgagagggaggtgaattagccacgatggactaactgccgcaaccaccccaaggttttaatggtattatacaataacagggcatttctaactcgtgggaagtccaatatggatgttcctgcttgggaggctgtcctctaggtggttgctgggggaaccaggcttcttccatctgtggctgcaccatcctgtggccttgaggtccccctggagttatccagcaggtagactgggagcaggagaggcagagagagcatgtgaatcattgaacatctgatacacagacacattggcctggaagtgacatacgttactgatccttacatcccattggtgaggactagtcatgtggtctgcccagctgcaagggagtctgggaaatgtagcccctgaaggctcagtggcttctcagcatgagtatcacactcttgggatggaggcagggggaaagcaccacaccttgttggtcagctggccacggctgccacagtgtcattcatttacttattcttcattcatgtaattcattatttcactcatttttcagaagagaactttgaggctcaggaaagttaggtgatttcactgtcacagagcatttaagtcacagttcaattattatttattaaggggtgctgaattaggtgcccctcgttcacgtacgcctgttccatctttggatttaacccactatatgatttatctatatgcgtgccaggaacatgattggtaagactgatttacaccacctcccaaattgtactttggctctcagttctcctccctctctcatttgtccctttggagaatgggtagagagagctagagctggaaaggcaggaggcagagaggtaccagagataagagccagaaagggagggggtgacagaaagatagaaagaaactccacgtgggccagatgtcctagaaaagttttcctagtttgacatgtatgggattttggagcagattcagttaggaaagattcaagagcagaggaaaaatacgagaaacataactgagaattgtgaacatgatcttcttttatgtgtttatggaaaagcagtgactttcttctgaatttgtttaaagtccttttgtgtgctagactgtacatcttgactatgaccccatacagagggatggggctgtaggcagcatgaccacaggtccccatcagccatggaaaggccctgtttactcctgtcatctccttttactctcaaatgtgccctagtttgagtaaatgaagtggccatcctaactttggaggacagtggcttttgagtgtataggtctccttcccaaggccaagtgctcctctgggatggaagccgtggtcagcttatctctgaatgttcaggcatagctcaggccctaatgcatagcaggtgcccaagaaatgaatgcagaagccaggaagaaccgaactatagtttgagctcaggcctttacactccaaatgccagattcctcctactacgccggctttggttgaggagctctttgaacacagtgaagcaattaaagagtgactcctggtgtggagccacctgcactgcataccagagggattcacagaggggagctgcatattgtagtagaaaacagctcctaagcttcccacttcagagcctgtggggaagaagcagagtggggctgaggaccgccctccagaaaccactgtcttggtcctgcactagagcacatggcttaagtctcctcctgcatctcttgtgggcaggaggcaggggattataatgaggtcctaactctgaacacaaacatgccagagaggtttgaattagaactctccagagaggaaaattaagcttcaggttttagtttttaaaatgtgcatttatttatcagtgtaaatagcttaagcacagtcttaaaaattggaaactaataaaaaatcatctataattctaccatttaataaatgtactatgtgcatttataaatttttttccaagatttttttttccctttgtaaatggtttttctgtacatagttatcatcataggctgttgtattggttatccattgctgtgtaacaagcagcctcaaaatgtagtggcaccagatgctcaggattctgctgagtggttcttctgggctgggctaggctgatctcagctaggatcactcatgtacttgcagtcagtcggtcccaggggcctcccttgtgtcaggtggttgcctggctatcatgggtgacaggctagtgactatgccatgtgtttctcagcaggctagacgagcctgttctcatggtgacaagatgcagaagcagtagggaaagcagaagctgcaagtcctctagaggtccaagcttgaaactcacactgtcacttacaagcatttgattggtccaagcagatcatgaggctagcccagactcagtggggtaaagaaagtttatttcttgatggaggaactacaaaatattgtggccatttttgcaatctatcaggactgcgtgaagttttttacctttccatttttaatttattatcgcattatgattttttccttactaatacaaaggattcatgacattatttggatagtagacagactacagtttacttaagcatctcccaattattaaacataaagatgacttccggttctccagcacataaataaagctgcatggaacatcttgatgcagacaggtatttctgtaattttgattgtttccttgggatagactcccagaagtggattcaaccaggcataaatggtttttgatattctgataaatgaaagaaatatggattaaataatacatatgccaaattgccctgcaaaattatgctgctttacctccagccacagagagaaaagggattttcttttcttttttttttgagatgaagtcttgctctgttgcccagggtggagtgcagtggtgcaatctcggcatactgtaacctccgcctccaggtatcaagcgattctcctacctcagcctcccaagtagctgggactgcaggcaccaccaccatgcccagttaattattagtatattttaattttttagtagagacagggtttcgccaggttagccaggctggtcttgaattcttgacctcaggtgatctgctcaccttggcctcccaaagtgctgggattatcagcctgagccgttgtgcccagctgagaagagggattctcagcagcagcctggactcaggcatccttgcagggcctcctggcttctcttgattcattttgttttcctggtgcctcatgccaggaagctggaatgaagcacaactgggcagacccttccttgggcaaaagtattagtgtctgtggtcattgttctctgacagtcagttctgtggtacataacgattggttcaggcccctgtgatcttcttgtccatgtgagactggatgaggagtctcctggaccagtgatggtaacacctgcaccctgagctggggagcaggtggtatcacagacgagctcccatcccaggctggctctcacagtccctttccacagctgtgttaccagcccctgctcaatcatgtttccatgtgattctcatggaaaccttgtgtgattggcaacaccaagatttgtcccacatccagatagagactaggggctagaatacctctcccctgcccgtttctccgggcttgacatttcagccagacacctcttccacttcctcaaaacttatctgtctcctcttttacttcctcagttccttgtttgtctaaaacaccagctaactgataattgcatttatagttactatgttttcctcctagataacaagcttcattgaagattttctaaaaatatttggctctaatataagggaaattgggatcaccatgagcagtgagttggtgggagagagattgggggtacgtttatggaaaatcacggatccgtgggtctggaagttaaaagaggactggccctttgagcaaataaatgaagagtaagctggagagcttgtgtgtatagcatttgagggcaagggctctggagttcaacacactcagcctcaaatcacctacccattattggtcgtgtaaatgtggccaagttacttgactgctctgtgccttggtttttccatctctaaaatggacataataacccatacagggttattataaggattttgacaagaaatggcaggtagcaataattacacctactgaatttaaaaagtggctcaggcacaagaggtgagtggcctgttcaaggcagcatggcctggaagaccttcagcaggggccagtaagcttactagccctcatacccaggaaagcggtttatttctcctcccacatcagcatccctctcttcttcctatgtcggccccagaaggttcacaccctctccctcttaggctccttcctcattccgaggcctggagggtctttgcacagagaggaatctgcttcctgcctagagcttggagaaccccaggccttccgcattcatgaggtccaaggccaggcaggaggcaaggccatgggcccaaatctgtgccatgagtgtcaacagaagatcccaaagctggagaccccaaataaaaaccccaagagatgtgggggcatcagcttcctcagactcaacccagcaccattcagcagctttcaagaccaagaagtccatactgttctcttgctcgcaagatactcagcctatgaaatcctcagctaatggagtcctcagagcagcatggagccttgggggtgattttgaggaactgacactgggaaacagcctagggtctgtggtgcgcatggtgggcagcagcccttgcctgtccacaccacggaccagctaaccatagacgagttaagagtgacagcatgctactgctagcgggggaagctgcacgtgccatggttaaggaccccagggctgggtctgtgccccatcatgttgcgtaacaagaaagacaaggattgcaggtgctttcccacaactaaggtgggtgcagctgctgggaatgggagaaacatttatagatctaaggatgggcaggaatttagaaaggtaagggtactgtctgccttggctgatacttttatttccttctatccataagtgtaacaaaaaaatttttttaaatgctatgtaaagatagggaggtttgaaatttttaccaacaatcccaatccttgaacacaaagactattatcatatttgtgactgttgaatattttttaaagacatgttaatactacagggaactgcatttctatagaatgcactttggaaagcattgccctacagtatttataaatttcagaacacattttaggatctgccttgtgttgtttctgtcatcattttacatttgctagtcttgacttccaaccacccaacacgcttcctgagggcagggcaaacttggacattattgacagaacaagtgcccaatctgaaaatgtgtcacattcctgctcaggttccaaacatgtcatagcggatttatgggtgtaaattatactgtttgctcaaaacactacctcatcttcagtggcgtagtgacagtgaccttcaaactatggtggcatcttagctataggggtgtccctcaaaaagcatgggctttgttgaagcacaacttactctgctgtgtgacttaagtcaaatagcttaatctctctcagcctcaactttcccacctgtaacctgggcaggataatagtttttagcttctagaacagattaagggtggtaatatgagtggaccatttagagtagctcatgagataaaactcaaatgctagctgttgtcatttggctgttaatgttatcttgaaatcccacagtagtcaatagtggatggcattaattggaggagggaattgttagataaaagatggttactagatgatagaaggagattcaaattattgactggcagagaactgtttatggaagagttcttggctcgtaagagcctcagttagatagagcagggccattggagggagaccagttgcttgaatgcaagctgttaatcctcagggaatctccatggctcagccagatcctggtctgtaatctgctctcaccacgggctgactgaatgagctcattgtcatgtaatttaataggagccaggtgtctgtgatttccaagagcgtgagcagaatcatcctgcaccccaaactaggagggggaaaaacacctcgcagaagcacacttgtccctagctgctttccatgtgtcagacagagaggaaattgtccaattccaaatgcattcctatccttctcgggcgatgagagaaagtaattggcatagtttgagtgaaatgaaggtggtggtttggggtatttggtatttcttattggcataaaggaaaacttgtattttaaataccccctggcttcttgaagaacgctttctctgctgtcactgcggcccttgtcaaaaaaaccttagctgaaaagaaaaaagaatgcacagaaaaagagcagcagagtgaaggctcagtcaggcggtgggtctttttgcgtgggtatttgaaggaagaaggaaggtgctggagggaaagtcaggctgctctggaaacatttcagtcctggaacacctggtctctaaaggtgccatcaatagcacacactccccaggcactgcaaagtgggcaagcaggtggggtttgccagtgagcaaccctcagggctgcagaggcgggaggggcagtacggggagaggctctattctagggacccaacaatcagtgactgttcatctccagactcagcctgattactgatgcacccgagctcacacagacctaagaggcagatccaggatgtgaacactggtctggctgatgctcaagactgtgccattcctctgccctcatgccatctcctgaagttgaaatctcaaacttggctgtgtcaccactgtcctccttggctgggagtgggttcataatttacaaaaatccatcaggacactcccctgggaccacctgccttcagggtcttgaggcctcaaaaagttgccctcagggattagacctggggtcacaatgtgtgcaatgtgggtgtgaactcatgtgtccagttgctctcagcaagccaacaagttcaagtcacttctccatcccacggctttgctcttgtaacttgggaacaaacagtaccccatgaataagttcacagaggcagggttgtgcagtagtgacacgcacaggctcttgaggcagtctgggttccaatccacccctgccaccaggatcgccatgtagggttgtgtggcttatggcccgttccagagctccaggccaagatgacaaggggggcccagcctgtgccactctactaagccatggtccctggaattccaccgacagcagggtgtcttatgccagttctacaaagtattcacatgggcgaggcctggccctgtgtgctgctaagagctgaggaatttggttgagttacataccctcagtgtgcctcagtgtctttccctgtaaaatgggcaacataatgtatttctcctctgggttgtcatgagcattcaaggggttaatacccagaaagaacttagatcagtgcctaaagtctggtaaatactcaaaaacaagtagtaaatatctaagaggctagctgttagcatttgactggcatttttaagtgtgttttgctaaaggccaaatctgaatccatagtgttttccagttttatatgattttgttctaagatccagtgtaactatcaggaatcctgggcaaagccatcagagtgctgtgagcccctgccagccatcccgtctcatcagcctgccctgtgcagggcctcctgagtcccccactcaggggatcacagacacagtgcagggcctcctgggtcccccactcaggggattgcagacatagcatgggtgcacctgggtcccccacacaggggatcgcagacacagtgaaggtgtaccaggtcccccactcaggagatcgcagacacagtgaaggtgtaccaggtcccccactcaggagatcgcagacacagtgcaggtgcacctgggtcccccatgcagggtattgcagacacagcatgggtgcaccgggtcccccacacaggggatcgcagacatagtgcaggggcacctgcatgttgttcttgcaccctgaaatggaataggaaggctggcttttttttttttcttttttagctcatcttctgttttggaccaattaaaataaaggcattttaaataggccctgtggaaagggaactgaagttgtttccccaggctgagctctgcaccagaggtcagggcaggattaataaggaagctataaatacaaacaatggcccatgtctctgtgggcaatgtgctctggtttgggaggaagggagaaaattaaattataatgggaaaatataaattatttggatcaggataaaaaggaagaaatcagtggtgtctgaatgaatctcagtgaatctgtcagaagagttgtgaggttggctcagtgtaggtgcacaaagatgcctaggaggatggtggaacagggccccacacagacgcaggtgaaactccagagtcctgccttttactgttagccatgccccacctgtggaattcagtgctattctgagatgagagatgattgtatttgtcagattttctatcaaagtaaatatagatggtcacccacccagtgaatgtgattttagcaccttccctgttgcagaccctcccaggtactggaggtttagagggaaacagagccagctctatgttgccctcaaggagcacccagacatatcatgtggccaagatgattgcatccaagcgatgctaattgattgcagccttgcatggacctggccaggtgctacagctccttggtagcacttgctcacttttatttcatggtacctcctctccccgctagggggcaaatgtcattatgatgcccattttacagataaggaagctgaggttcaaagatatgaggggacttcctcacagccaatatgtggcagagtcatggttcaaacccaggggttcgtaccttcaaagaccaagttctcatccactgtgcagacaaatgttctgacagaggacaggcaggggacagagagtgagagaaagagagagattgtgtgtgtacatgtgtgcacatgtgtatggcagtggctctgtgtcaacctggaaggcttcttggaggtggtgatgtctagtggaatcctaaaggaaaggtcttaaatgctacactaaggaatttggattttatcaacattttttttcttttttgagcagaattcagacatgattatatccccccaacaaatctatatttaataagcaactccaaggtgccagacaatcttctaggtgcagagagggttgcagacacttaatataagatgtagtctctgccctttcctagcttcagtctagctggagagatgaaacacagatttatttagaagataataagtaacagtgtcaataaaccaatgccgagcgccaaataaaagtcagtgagtaggtgagtggaggtcagaagagggggcagtctgggctctgggttggtcaaggaaggctcccagggtagatggagagagagaggttggaggggttatggaagattccagaaagggtgcactttgagggctggggcctagtgtttggcagtactagttcccccatgcttagcagagggcctgcccatagcaagtgacggtgcatgctggctgaatgaataaatgttggacccaatgaaaagaaaggacaaacggttgagagatgaggcataacaaacggactgtgggttgcagggatgtgtgaccactgagcctctacccagcccaccaatacagtttagttgacttgtggccccaccagtcagatgaccttccttggctttccatttttttttaggtcatgcaggcacatctgtgggagaagcaagtagactctataggggaaaagcaggagaaaagatgggagaagccttgggtgacagaaggaggaagccttgaatgtgagtccaacatgttagcttttttcctgcaggcaggaggcagccattgaggcctctggacattcaagtagcaagaggtaaatgatttggggagattgatctggccctccaagggggaaagaggaaaaatgctataggagagggtttcaggaagtgactcctgctatttaaaacgtgcaaaccctttcatccagaaatgtgacttctggagatttgccccaagatcgtggaacaagtgtgaagaaacaaaaacaaacaaaaaccagcaaaatgcctcctggaggtccttgcagtgctgtcttgggtggagaaaactagaatgcagctttctccaggggtgcagtgcagagtgagggagcttgctttttctctgctgcctctcacctcagggcctctgcaccagatgttccctctgcctgaaatgcttttccctgccaggtcacatggctcaatccttatctttgctgaaatgcccccttctcagcaagaccttccctgatcaccctattcaaattttcttctgtagccccaccccctcatttacaccacacacctgccgccccaggcacccagcctcgtgactatctgacatacccttcattttatttgtgtatctcctgtccctctggaatggaaactgcagtggcgattgttgtctgttttgcacacaggcagtatcctcagtgctaaagcagcgctgggcgtagtaagtgctcagtgaagatctgttgaatgagtgaatgaaggaagggaggaaggaatgatggtgggtaaatcggcgagtgtgtggcctacacaggacattagcttgagcaccagagagcagaccaaggcaggtccttggttcctgtgccgacctgcattgcggaggactgcggggtcttggtagatgaagcctggcctgggtctttcagggccctctggctggggccaggaggcacagctgcagtggacactttcaaactcatcgtgcctggccttggcactcggtgggctcatttctggtcataatgacacctttctaaacatagctacacaaaattaaaatgtcacagtgcaaatgctgcagctgtgtggtactagaaagaacactaggtcttgagtcagaagagatggactcaaatcccaaatatcaagccatctctctcctgggtgtgaccttgcacttctctgagcttcagtttcttcatctgcaagatgggaatggtaccagtagctgtgtcacagactgttgtgaaggccgaggaattaagcacggcgagagatttttggaagctgcaaagcatcacacattggacatgacttttacacataaatatgtaaaaatggtctcctgactgcgtccttggcttcctggcctgccacatggaatgagggcagggcctccctctcagcacagactggtctcctccaccagcccagcctccccttgtcacagtgagaaggagccattgacccactcagaagccactcacttctctcttacatggggaaatcagcaaaccacaaccatttatgaatcctgcatgttcccctggtcttgtccaactgtatctgctaccattcctgagtggaagttaaaaaaaaaaaaaaaaaaaggcagagcaagttgaagatgggaaagaggtgacctaaggtgacaaagagtcaatgtagaaggcagatatgtctcatcctcgcagtgactaagattaatgggcatggagtgtcaggagccctgccttaggaagaactctgagactggctccagaattctgtaaatccaatcaagagtgttgcaatcagttagcaatgtctgcctcaggcaagggagaagaaactatggtctgtatgtcatatctaatattctcccttatatctaaggtaccctctgctgtgagacatgcaatcaacccgatgaagctttttaggaaaaagtctattgttacatcaagtttaacgtaaagctgcctccttacatattttaaggtcagcctaaaggtttctctgcacatcgtgaactatagcaagtagagatgtaaacagactgtagcctacacttgtgccgatcaatgagttttggccaatcaaatgtggccaactgtttgaaccatgttcaaacagggcaaatgctgagctataaccaacccagctgtttctgtccctcacttctgttctctgtgcatcactttcctttttctgtccataaatctttttccaccacgtggctgcgctggagtctctgagtctactctggctcaggaggctgcccaattcaaaatcattcattgctcaattaaactctttcaaatttaattctgctgaagtttttcttttatcactctattaatgctagatgttgactattgaatggatccaagtttcaggaacttacaaaatgtgtgtgtgtttgaaagaaggaaatcattacttgctatcccttctctatcaaaatctacttgagcttttcaactaaaaattcaatgcgtattctttggggtataaataaatgtgctgaatctacctgggcttttcccactctgtggcttcttgtttctatgtgtgatgcgaaaaggaagctgtggaaatggggaggagattcttccaggtgttgggaaggcttccaatgcccagcatgtagtaggtgctcagcaaatgtttgttgaatgaattttcaatgatgacctcagtttctgcataacttttcatgattcataaatgctgttaccttagctaagtttaaatgtagtattttatctcctgtcatatatatttttctctctttttctgtgagtagacgccatgataatcaatcgggataacccacgaggacgttgtttcattctttctgagtgaggggatggggctgatagaggaagccggggaggggtttgcctgctgatttcttcctgcttttgtgtttgtgtttgccgtctgcctgtccctcacatttccctcagtgtgttcctatccttggatccctaatcctacagcccaggactttctacaacggtactactgacattttggatgggataattctttgctgtggggggactctcctgtgtgctgtgacatttagcaatatccctggcctctacctactggataccagaggcaccccccacccccagccgtgacaactaaaaatgtctcaagacacaccacccaggtgagaaccactgcttagcctccccggggaacatggctggttccttctttctgaacagtttcagaaggaacatcaagtctgcaacaagtcttctgacttcatggtccacaccagtgtcaggcccaccgtcctatcaaccctccaggctcatgtctccaaggagctctctgatcattccctggtgtctctctcgtttgctgtctgcccctctcccctgggctatgagcgccacaggagttttttctattttgattatctctctatccctggggcccagaagtccctggcactcaataggttctccagtggataaaggtgaggacgaggtgactgggggagcctccctgtggagtgacgtctccatgccatgaaattgccagccctgggaagtcatgaggaagaacactccaggcagagggcacagtcaccgcacagctctcaggcaggaacaggtttgccttgtggaaggctgctggggaggagaggggagcgggattggagaagggtgctccaagagccagaaaagctagtcaggaggccacagtgaggggtgcaaactcagttccaggagtgacaacaagccctctggaaacctcccagatgtcccaaggtccacccctggcccactctcactctcctctctccttgtcgcccagcctcactctgggaaggctggggaggattcctaaatctggtctgaactcctgaggctgaagccagagctggtgtggcccccaagtcatatctcagggtgggagagagtccttccatcaaggaggcaacgctatgagggcagctcagtgctcagcccacccctctaaccctcatgggcgggccctcaatcagaaaccacaaattccaggctcagtcagggaaggcctggatcctccacttccggctcctcccggaagtcagcttaaagaaatgatgcggaggaatgatcactgaagagactcgtcattcctggtcaaaccatgctggaggtcaggggtttgttaactcagccttgtcacaggggccttcccttccacctcaatgctacgacagagctggtgttgaaggtctttgacgaaaaagctacatttctgcatttaaaatggagaagatcaggccactcagtatctccggtgtaagaagacatttggcaatagtaacagctaattttttttaatacttaccgtaactcattttacccatttcctgcctagaaaaaaaaaaagtgcagctcactgccagcactcatttcttggggcaaacaggaaataagttaatcttaacaacaaccctgtaaggtgcatagttttattatcatccccattttacagatggggaaactgaggcagtgaagtttagtaattttcccagattcactaaaatttctaagatatgtttaacaaagaaatccaccctttaactcttaaataatatcctctttttaaaattaatgctagaatatggtgcaatatctttttaattgagtgtatcttttgccccagcaattctaccactaggaactgagcctaaggaggtataaatatttagttagaaggatgcagtattatttagtatgtggaactcaatgagaatctccactaagaggggttatttaaataaactgtgatgcctccatataaatgtagctgttcaaaatgacatctgtttgtatgtaccaacataaaaagacatctaaatcatatattttaacagaaaagtccagaataatcacatttttgtaagcagtcattttgtctgaggactgggatttctattgacttttaatttcttattttcacgtgtctatagtctctaatttttctacaatgaacatgtactacatttataataagaaagaaactcaataaaagttattgagtaaaagaataagcagccagaaatctgtctcttctggggaattagtgagcctcttcctccctgagagtagacgctatggctgctttgctggaaccttccatttgtcccaaatgctccactctctgccaatgggagacggggtctatattcacctggtcccttctgcgtgaggccaccttggcagaagtcactgcccctcccaaggcatctgaccctgcaaaaccctcttgtcgtctgggttctggtaaactccccattccctgttttttttgtgggtatacagatagtaaaagctctgctgccctggccctggttttaaatgccccctggtgttttctctatacgccactgacaccttgatcatgagtcaaatcacctgaacatagagtagcatctgcttcctgttgagaatccaacgaatacatttacctgatttgctctctcttcttttcctaagtcctaacttcctaaaataaaatgactctccaattcacctgtccaccttggccttctctccttatacccagtcttgcccactagacgtcttcgtttgggcaaccacacagcttataagcctcctgatgcccaccacaggagtcttattttgtgctgccacgttaaattctctcttccatgagcaccactctttcactttccacccactccaaacctgaaaatcacctttctccacccctcctttaattttttacatctcatcagtgcccaaaacttctgaaatcaacctcagtaatgtttccttcaaataaccccttcccggctgggcgcagtggctcatgcctgtaatcccagcatttggggaggccaaggtgggtggatcacttgaggtcaggagttcaagaccagcctgaccaacatggagaaaccccatctctactaaaaatacaaaatttagctgggcagggtggcatgcacctgtaatcccagctactggggaggctgaggcaggaaaattgcttgaacccaggaggtggaggttgcagagctgagactgcaccactgcgctccagcctgggctacaaagtgagactctgtctcaaaaaaacaaaacaaataccctcttcccatcatttctccagcccttgcctcctcaagtcctcctgactgggttcccttggctccctgcttccccctcagtctgttatgtgtgacttctgggtaaaggttcttaaaatacaattcagatcctatccagtcccctactcaaaactgtgcccatgggatcaaaaccaaactctgcaacattccattcagagctttaagagtacttttcagcctgaggtctcctcctcaccactaacacccttccctccaatcaaactgatccattgtacctacaaaaagcccgtcccacctcctagcctttgttcacactgggttctctgctggatcaccatccctccacatttccaggtgtccctcaagactactcagcagcagctatccatacaagttcctcaaccctggctttcttgccctcaagtaaccagttcatcctccccagtcatatagccctctatttacatttcttttctggaagctatcatttttcacgtgccatttgagtgagtgtcctcgctaagacgatattttctttgagggcagtaacctttcttatatgtctctgtatcccatgaacttagcaaaaaacaagggacagaacaggtgcaaagtctacgtggttagtgaatttaacagatcttcctaacgtgtaaacgtcgttgtccaggtgaatggaagaagtgagctgagatagaggggacagacagagtcagtgtccagtgctgacctctgaaatggaaaaacatggccagtccttaggaggctgcagaggccaagaccccagtgaggtttgggggttccacagcagaggaggagctgtggaccacagcaggaccccgatgccatcagcaggggaggaagtaatcagagaggtggaggaaggaagccaagggaagtcaagtaaacaccaaatattccctcccggtccaatgctgtgacctgcataagccaccactcccccagtctagactctacccatggaagaaggaagaagatagaactctggatttgaatataattctaaaataaccaaatttatctgaaaatgactaggctgagttttctgcttcaaccagaaatggagcttggagtcagaaattatgtgaaattatagaagagaaagtcaccatcttccatctctgagtcgtatgatcattttagacataaaattgtgcacttacgatgtaccaagtgcttaatatacgtgatctcatttcaccagggaaactgtataattcattgctttaactgacaaaattctgcaactgaagaaggtgctgttaataattgcattgggacgcaggcctgagcaggccatgatttgtggctgtcctacatctgaccctcacagtatccatgggagaaggcagcatgtttatgccccctgacagctggggaaaccaacacttaaagtgattaagtcacaagtccaaaataaatgacagagctgcagttcaagcccaggtggtcatttaccaaaggccatgctcttttcactttgcatgggactgtgaccgctggctctacccagcttcccagtgcgacccttccccgcccactgtttctcttctctggccaacggaaacacaatgagaccacatatgtaacattacattttttcatagccacattgaaaagaaaaaggaaccaggtaaaatccattttaatatgatattttatttaacccaatacagttgaggcttgaacaacacaggtttgaactgtgtgggtccgcttacacatggcttttgttcagtctctgccacccctgagacagcagggccagcccctcctcttccgcctcctcctcagcccactctacatgaaaacaaagaggatgatgatctttttgatgatccactttcacttaataaatagcaaatatatgttctcttctttatgatttctcgtaataacattttcttttctctagcctcatttactgtaagaatacagcatattcccagctactcaggaagctgaggcaggagaatcacttgaacctgggaggccgagtttgcagtgagccaaaatcgcaccattgcactccagcctgggcaacaagagcgaaactccaactcaaaaaaaaaaaaaataaaaagaatacagcgtataatgcatgtaacatataaaatatgtgttaatcaactgtctatgttatgggtaagtcttccagtcaacagcaggctattaggagttaagtttctggggaatcaaaggttatacacaggattttgacggcatggtggttggcactcctaactcccacatcgttcagggtcaactgtatattcaaaatagtattcaaaatgtaatcaataggaaatagtcattcatgaaatactgcgtcttcttcttctcccccccaaccccacttctttgtattcagtcttcgaagtcagtgggtattttaaccttacagcatatctcaattcagattactcacactctaaggactcaatagccacgtatggctggggtctgccagccggacagcgaggtctagccctgatctgagcaggagccatttgattgggttgttggtacactgccatctggtggacagatgttccttgcttgaaaaaccacctcgaaggaaagtatcagcatcagggacaatagcacagtgggcctcaggatcagctccccggaaagagcttggggttggagggggtgttgttgctgaggatgtccccagagaagatgtacagccatggagcaaactcaagtcacttatgatgtcggcaaaccttggccgtggtgcactcttgtttcctggttgcaaaaggatttagcagaaaatggtaactctttttcagaaggcatatttaaagcagctctttaaaaagcaggagtttctttcacacccagtttcgccatgtggttgtgtgaagggcttctccccagaaatcatgtggtctctcttttaattcacagtaaaaacctttcttctgtcttggcccattatggctgctataacaaaatatcataagctggccttatataccatagaaatgtatttctcacatttctgaaggctgggaaatccatgattaagagttggtgtctggtgggagcctgctttctggttcactgatggcgtcttcttgctgtgtcttcaccgaggggtagggacaaggcagctctctgcagcctcttttctaagggcactagacctatttgccatggttccagcctcatgaactaatcatttcccaaagtccccacctcccaacaccatcatcttcatgattagatttcaatatatgaatttgggagaggatagaaacattgagaccatagcatctgccaagttgtgtcttcctcactcaaattgggtaggtgtggttattccagagtttcagtgaaccaagacgtatttttccaatgtgaataattaattaagaacacttgattagggtcaatgttattctggacttctgaatcactcccacatttgaaggggagttttaaacacaactttgtgtgaataaaatgatgtgtctgcatctctccaggaagcagtgtttggagctgagatgacttggcagggagaagaatccactgggacattcaataacttggcattgagagtgttttcagcaccatgctgtcctcagaatagtgttagaatttatataaacacagatgtgacttgtgccttgaaggagaatacagtcttcccaggagagacatgcaaaaccatcatagacaaacagcaagaaaacagcatcaaggatgtacatgcaccgggcagaatgtaaactggatgtaaaaccaagcatttgagggcaatgagaaaggaacttggttctggtctcaactctgccacccacagctgcgtgactatgtctctgtcacactgcttctcaggtcttcaactttatcgtctcatactgagcaagagacagtctggacaatttatgcttctagaatggggagacaagaagaaaagaaagatagatacccaaggacttcagtgactggctcaggaagaattactcagcagtgagggggccagcatgagcccaggggcaagaagccgggacttggaacaggaaggaaaggtgctcagctggctaacctagaggaaagtgattggctggagtgtctggtttatctgtttcagggatggttaaagattgccccgttaataggcaaaaattgttgccttaaagaacctagaatctaaaggggtctttgacataatacagaataacaggtcccagagattattttacagaatgttagtacctcatgatattaatagatatataacaaaacagacttctttgccacaagacttctcagtacctttaacattttatgattttcccaaaggacaaagagtatgcagcatttcccagacttaaatttaactgtgaacacctgttatcctggggcaggcggattgcttgagtccaggacttagagtctagcctgggcaacatgacgaaaccctacctctaccaaaaatccaaaactcagctgagcatggtggcatgtgcctgtagtcccagctgctcaggaggttgaggtgggaggactgcttgagcccaggaggtggaagctgcagtgagctatgttcacaccactccactccagcctggacgacagagcacaaccctgtctcaaacaaacgaacttcagtgactggctcttaaaaacaaacaaaaacctcacagaaccctcactgctctagtcctgactttttatagatagggaaactgaaaagctaagaggcaagtccaaatttcacaaagatagtggcagagccaagattggatttttggtcttttgactctaatacccagtgaatttctttttctttcttgttttttttttttcaattcctattatacactatttaagacacacaaacagataaaaagactaatacaagatatccatgcaccaccacctagtgtaagaaataaaacatcaccaacacaataaaacccccttgtgtacctctctccatttgtctccccaagggaacccatatcctgaatttggagatataatacatgaaaattctggtggaatttcaaataagtcatattgtctttagaggatcttcttagcatctcccatgatgtctaagttgtttcaaaacaaaaccaaaaaccccacttggcccagaagagcaaagattaaaagccagcctcgaggatccccagcttggctacctgcagctcacagcatattggaaaaattttatgaatcggtgaactttttcattctcaaatgggctcttcagatggtttattaattctgttagatgcgggggtgcgtctggctttattctgtgtggaatttttggatgaattcactgcctcaccccctcccctccacaggccagatggggagccgggtgctgtataaatgtttaattgtggctcagtaaaaatatttgctttcagtagctggaagctaccaaacggaggtagcgctgtctactagagttgccagacttcattctaatgagaacagaaataaaggctgattaaatcaaattccccatagtgtagaaccacttaaataaatgtttcatattgtttgcatgatgattttaaaatgtaacagctgcttatgtaaccattaggctggacataaatcattcatcgccatcactgccgtcaaagcagcactggctctttttcttctgctgctgacatttccattactagggagcttctcagacatgctcttgggttccctgtccttacccaagtgcggggtagcaggagactgagggagggatgaggaatgaagagcaggcacgaagctgccatttatcgaaggcctactttgcacatgtcccattgggctggcattgtcacatttcatccttcccacaaggaggcattactgttcccattttatagatagggatgctgaggcctatggaaatgaagtgagctgcccccagagtagggaatacagcctgtatgtgaactcaggtgtgtctgagccttggcaactcacacaaggctgcccgagaacaaagggtgcatcccaccccgaggctccacacacctcaggccttttagcaatgatgagagcagtgaagaccagaccaagactcagaaaactgcagaatcctttcggctggggctaggggtggggcagggtagatactgatccaaaggatttggactccttttcctagtccaaatccccatcgtctctcccctgttcactgtgtcagcctcctgactcccctgcctccattcttgcccatctcaatccatcattcacccagtagcctgagcgatcttttaaaagtagaagtcagattatgtcattctcctgctcaaaagcctccaatggcatcccaccactcttagaataaagcccaacctcccaccatggccctcaaggccttttatgatatggcccctgccaacatttgctcattcgttcctaccccactcctttatctgggcgtcttggcttctttctggtcttcagacacaataagctcatgcctacctaagggcctttgcacatgctggaaccatcctcctcagacccttcccatgactagcttcaacctgtcattcagacctcagctccaagtcacttcctcagaaaggccctccctgtaccctggattgaaaacagccctcccctgcacacgctccacaccatagctctgtttcatttactttacagcactgaacactgtctctatttcttatttgctattttcctatcccactataatgtaagctccatgacagatatctgggcggttctccactgcttccccagccctagaatgctgactgtaatgtagtaagtgttcaataactattacttaaataaatgaattaacttgtctcattcttttcccctgcatccaagttgggtgaaccctgacctggccccttgaaagagacaatttgattctgaaaaccaattcttacctccaggctcaggccccatgcaggagtctttctccaggtggcctggccatgcaggtgatggcagtcatggggggaggcagagagctgctggagaaaagctaggaggccctttggggttccctgtattcataggaaggaggatcccttggatccatgcccccaactctgcaaagctgagtctaaaggatacacagaacacaagacatccttctgttgccaccaaagcttctgacaccccattttggctggagagagacttgggcacagttcttgaattggctgcaactccaccctccctcctgcaagtgcctcttcctctgccacggaagcctctgtgccatgaagaagaccaccagacctctccaggtgagggctctgggtgtcagtcccctacgccctagcaagatctggaaggcaggagccaccttcctgcaggcaggcaaggtcctggaaatataaggttgtctgtggccattgaccatcctactgcttcctggtgacagaaaatgttgcattggtggcagccatggggacagcttcctggttcctgaattgcagcactggtccgtggcatgctctaggactcaggcattttctcagcagcttttgaggtagtggccccgggcaggtcagtttggcagtgtgctggggattattcctggaggcccagcctggtggccgcttctccagcccttccagtgatttggaagcggctggttccttgcagtaagtcccttcttcctcgaaccactgactgatgcagagctcctccatggtagggactggttctcttaggcccctgtatcctcaggcccagcatgcttgggaaaatgtttgctaatgctttgtgactcaaaaggaatcacacacacacacacacacacacacaaacacacacacacagtttttaatattatcagtcatatcagccccctgaggcagctgctctgttccagacaaaccctgttaataacattcttatcctctttgtttcattttccagctcaatttggaagcctgaccttgtcttgctttgcctcctactgagagttaatactgggacatactgaagggcgaaggcttgagtcacaaagtcacagggataaatcctagatccagcagttactgtctacatgacactaagcagattagttgccactgggactcagttttaccagtctgcaaaatggagctatcagccgcatctagcactaggggcgctgtgagcatggagggcagtctgcacacagaggcttaacacagtgcctgagcttgcaggtgcttggtaaatggcaattgctgtcagcattgtctgatttacctgaaggaacagttcacactccacccagattttcactgcagcagccaagaaagaacttctgggaaagcatctgcttccacccaactcccaagaggggttcgtagagggtggagctgagagcccgcctcccctaccagcctgcagaaagaaagccatgttttggcctcagggaggagaaacccagataaaaaccaccccatgtgcagcctttgcgtggccacaggaccagctccacagggagagggaagaggcgcggccgcaggaccagctccacagggagagggaagaggcctcctttcaggggtggggagctgagggcaagacagaccttttctgactcagcccaaggagggctggagcaggggctgcaggttccctgctttctgctacaacacagggtaggggagagtcatggcctcccagagcctctgcaggttcacctgccaaatggaaataatagcatcctcctctgcaagtcacagccttaaagaggtgctgagagtcactagttagacccaagccagctgtttctggtgcattaggactatcgaccagaacccctgcattcccagcccctcctgcggcctccaacgaccaggagagaaaggcgtaaggtgtaagactctgggccaggttctggcagcttatggccactcttttcttgtgtctggacaggagcattatagctacaaccatctcatctaatcctcactgctgccctatgaggcgggcattcttatttccccagttttgagataggcacagaaaggggaagcgacttcccaggttcacattgccagtaagtggtaggactaggccctgaaaagcacagcctgccatggggaagagaattcatccccagctgagaaccactgtatcctcacccaggggttcccagccaatgcaaacagggacgtgaccagtctccactggtcccctgtaccaggtctccaccttgccggcctgctgctgggccccaggactgctcccaggctgcacctgtggggtctgccacctcctccacttccttttgagaagctgctcccaccccttcgccttcatctcaaaggaaagtgtgctgccaggcagctggagccagatggcccagagacaactcttcccatcacacttcctgcagcatctgagtccaacccccaactccagagctggcaagctgcccagagcctcccagaggaggcctatgggttaacttcacatttagtattttcagcatatggtagaaagaaaatagtgttgttagatgtacaagtgtgatttcccctttccagaatgccttcctctctcctccacgtggtgagctcctattcatacttcaaaaccatgctcaactattccctgcccacctgtttccttccactcctccccttctaatgtgggtgtgtcccagggacaacatctgtgttcctcagtgaagttgagagaagcctaaatttgctctacataagaaaaaagaataaggaggtaaactggaaacgggaggaggctgggaaacgcagggttggtggaaggacttgtggggatgtcgtggcagccacctgagggtaaggaacgtgacagccagagcagctatgcttaaggggctttgccacagtgcgaaagataggatacaaggtcctcttcagtctctccatgaaaaccacagtcaaagtacacattactcacccatgctttggagctagatttgggcttaatgctgtctttttttttttttattaaaacaatattccaggctgatggaatttaacaacaaggaacataatatctgacacaaacatagcctaagccttgatatttatcatcttatatagcaagagatcagggtgttgagaactttagagcagctccgttatgtccaggctctgggcggtttctgggattctgtctgctgtcccatcagtactcacggggtggctgtgtctgctacagacatcatagcctcacgaaaccacctacactaaagccaataggaagaaaggtgtgtgtcaccttcaccttcccaccctttatgggggaggaaaatatttgccaagtgacccacctttcccttctcaatgcccctttgatcaaagcctggttctatgtccctgcccagctgcgggtggtgctaggaaagaaggtatctggggtttgacagtctgctgtgagggctaaataaaaagggcgtgagaggtctgccctctgcttgtactcctctgctgagggagaacttgctgcttctggataccaccctttcccatcgtatgatagcctgaagtgttcagaacttttcccattaaatcacttgaacccgggaggcagaggttgcggtgagccgagatcgcgccactgcactgcagcctgggcaacagactgagactctgtctcaaaaaacaacaaacaaaattgactttctcccactgagcccaaggtgctttcctggtaacttctctttgacccagtcctgcctcctgcatcttccttcagcaaccctgttctccacatcagccaccagagggaacatcttaaaacacagggctagactgggcatgccgttgtctctgctaaacccctcactgagtccccagtgtctacaggataaaatccaagcttcacggcattggaggctcaccacagtcctacttcagcctagtctctcttccttattcttcccctacatatatatgtatatatatatatattctcatactgtaggtgaagcaactgaaatgctttttattcccctgacactttttgtttttcaaattcttgttgtacaaatttatgggggacatctgcagttttgtcacatgcatagattttgtagtagtgaagtcagggcttttagggtatccgtccccacaatgacgtatattgtacccatcaactaatttctcatcatccactcctcccccacaccctcacccttccaagcctccattgtctattatcccactctctacatccatgtatacaggttatttatctcccatttatgggtgggaacatgtgatatttgactttcttcacctggcttgtttcacttaagataatgaattccagtttcattccagttgctgcaaaagacgcctcacagaattttaaatgcttatatatatacatacaccccctttgtatttgcctacacaaaactaacaaacctttgtgaaatgtaacctacaggaaatatgatcatgtctaatgctggacatgaagcagatgcaatacacaaatccatgaggtagacccaggtatttcagatcctgaccttgatctcaggtttacttattagaccacagaccaaagactcccactgatgtccccacagatttcaccacttattcctcttgtcccacacactctactccaaagtcaccctcctctagaggatagtcacctgagatacttcagcgaccctgctcaccttggaaaatcaggtgacaggaatcatcagttaagcctgtggacagtaagcatctgttggtctggatggtgtggtgggcggaaggtaggacccaataggggcttttcatggttccagccccaaacctctgaccatgccagtgcatgctgaaggcccccattccatttatggtcggggccacatgatttacatttactgtctcaggttcttcttgtaacactgtcttctccaatttttgataagccaatgcccctgacacttctatgttttgttcaaattgttctacttgcccagcattctcttccaccttctccagctgtcaaactcctacacacccttcaaagcccagctcatgggtcctctccctgacaatgattccagctgaaggagatgacattgctacttccttggctcctatcatacccggtatggctagtgtagcacttaacattgcttggtgcttggtgacattcccaaacgttcatctgtcctcaaggatgggaacgtcctcatttcccatcatttaggaagtgcttgctaaaccaaagactcagcccctcatcaggaaccagtgaaggacagagctgggaaagagttgtcatgggcatggggactatgtgaggtcatacgcagttcctgggtcacagaggtgacccacgaatggtagctgcagcgttgattgttgcccctactattactgtgttattactgatctcagcccttctcttaagtgaccccttcactagtctcatagatgagcggccagcctgcctcctggatcccagaatttgctcactgtccacgacttcctgtcatggctgggaacattcaggcaggatctggtcccactcgtaggaggggaagacaaagagtgccatccctccaggccctcccctcctgcaggacagatcatcctgcctcactccatctgcagatgctggcaaagcacattccagccctcgcctctgaggcagagaaacagattccaattaagggacttgcggaaagtggcttcattttacaagcaattgggttgtgaattgaagcgggcattaaagtttacaagctaggctggcggaggagccagaaggccttgctgccactgcctgtcaggagacatcttctccagttactcaacaattgtgtggagtgagtgaggagtcggcacgaatcctgccctccatggctgatggtggaagaaatgtccattcattcgtcttcttaaaaccaaggatcaggctgctggagggcacaggatcatctctctcctgataggctttccccttctctagccttatgtgagaatctgggggattttaggtggtggtgagaaaatggggaaagaaatcacattcgttgacctctgcttacagctgggatccccacgcagctgagaaatttccaggaaattacctgggttcaatggaggaacttaacacttcaagctgtcacctggtgggaaagggtggtggcaagaagtaacaagatctcccaaatggatccaaccagagagaaggcctcctcatttccttctcagccaagcccacgggggccctggaagacagaggttgccggggcatccagggtctacacgggctgagctccccagacctggtgcaagggggccaggcattcccgccaaggctctgccacctacccagcaggacccatgagctcagcacctttctggacttgaggagatgggtctggttttggccttttccctccagacttccttctgtctctgcctctccactgacacctgcctctgctgtcccccaggacattccactctcttctctaaggctcaggcctgaggggttgctggtgggcagattccatctcatggttgagctgtttggcctcaatggcattttatctctctctctctctgtgtctctctctttctctttttttttttttcacattgagccatcttcttacagctgaggttttcatataaaaaagcaagttgctggtttctctttaaaagtagggcaatctggcagttctgggcttgtgtaaaaacaattcggtagagctaaaaacaggggcttctgataaagcctgagctcccagcagccaaaggacttatcaccccacaaaaaaatcccttcctgcactcatttatatcaacccctgcccctgcagacacgtattgtaggttttaactagaaacaagaggattagctttatttaaacagcaaaactgcttaaatgagataatatatgtattgggaatggtgcctggcacctaacctaatccttagttaattaatatttattgagcaaatcatcttgattattaaaaagacaggccagctggacacaataagaatgctagctcagagctggcacttgagggttcggtagaatattcatggcttggaggtgggggctatgatacgagcccatataatcagagaagttcagatgggaaatgagaaccacttggtagcctaaattcagagaaactaaagccagcctaacgctctgaagctggcaagtgttcatttttggaaatcagaaagtgatgatgtgttatcccaagagactcctgggacaagatgcagtgagcagccattcacaaagactaccttgaaccgggctctttccctacattttgttattatatcctcgctacaaccttctgaggtggaaattaatatccccattttacagatgcataaactgtctagtgagggtgacagatagtattgacatgaccagaagaataaatataaatgagataaattctctctgaaggaaaggaatagggatttacaatggtgtaaaacaaaggaagtggggcctggtctaagcgatcagggaatgtctctttaaagaagtgacatttaagctgaggtctaaaggattagatgagtgttaaataggaggagactgggcaggagggaaatcttctccatggctctcaatccagacacacaatttgaaccacctgaggttcacaaacacaaagaaagtatcgtgacctgatacagtcccagtctaattaaatcagtagaacccaggtgccgatgtttttgtttctttttattttatttattactattttttgagatggagtctcgctctgtcacccaggctggagtacagtggcacaatcttggctcactgcaacccctgcctcctgggttcgggcgattctcctgcctcagtctcctgagtagctgggattacaggcgcccaacatcacacctggctaattattctatttttagtagagatgggatttcaccatgttggtcaggctggtctcggacccctgacctcagatgatccgcccgcctcggcaccccaaagtgctgggattataggcatgagccactgtacctggctggtaccaatgtttttaaaagctttatggttgaaccactgaaatgaaacaaaaagtaaatccaaagctcatatactctagccaaacaatagccattaatagctattaagtaaatagaggagatgctcagtgataatgagcaggtagatcatcagcatccttgtcatcaccactacatctgcctcctccagatcatttggtagccaagtccaatgtcaaaggaataaaggaaatctgcctctgttgagggcttgctgtatgtcacgcactatgctaaattcttcactgtttcatttaacgtttaccgaaacccttattattttacaaatgaggacgttgaggctcagaacaaggcaccaatttacccaggatttcacagctcatcggggcagtgggggaccctcttccaggcccacctggctgtagagaccacactctttcctgtctccatgcagaggggcctcctgctcactttagctcccatttcccagcctgactgccttgattgggccgcatttctttgttctgacctcaaaaagagttttgtagatttgtgcccacttttctcatcacgcttaagaaaagtgaccaaagctgaaccaagctatctaggttcaaatgctgcttactggctatcgggccccaaactatctgtggaacttctttgagcctcaattttttgttttctataacatgggaataatatcagtacctccctcataagtttcttatgaagattaagtatgtatgtgttaagattcatattaagtgagaattacgcatgtacgcatatacatacaagattaagtatgtatgtaagcatatatatatacacacacatttagaatagagcatgaaatatagccagtgttcagttaatgtcaagtattgttaatattatcctatgggctggagtgagaggcctcctggggtgtttgctttccagcccccaatcgggtggcatcctggatagggtatcatcatacctctccccaggagatcaggatagggaattgtaagagcactcaggttggaggtaggatgtgcaccagggaagctcaggcaggaagctgctgtctttcctggtctctgcagactaggagcagcagccagggacctgggttgactgggggacgggtcggtgggtggggtgagatgactatcacacctcctctaaaaacaagatggggcctggtgcgctggctcatgtctgtaatcccagcactttgggaggccgaggcggatggatcagttgaggtcaggagtttgagaccagcctggtcaacatggtgaaaccccatctctacttaaaatacaaaaatcagccgggcgtggtggcacgagcctgtaatcccagctactcgggaggctgaggcaggagaatcacttgaacccaggaaggggaggttgcagtgagccaaggtcgtgccactgaactccagcctgggcgacagagcgagactccatctcaatccatctatcagtaaaatacaggatggaagggaacgcccagctctcagtcagctgccagcccacggccttggacgccactgatgtgagcctgtctgggctggggcagaaggggccagcgtcaggtcctcagacaatttcctcctggtagcctggcctgaggcccacccaacccagggagccggccctggccagttgcagccagtaccacctggtgcccagcagagggcagcacaggccacaggctggctttttctaggtgaaattttgctacaacgtgtagcctcttgggttcggtgtctcccctgtacttctttgcaggccggagaagtcccggacattatcacagacaccctgcctcatccccagcttctgaggtctttctggactctgttagcatatttcagaggttcactgcaaaccagaaacgggactttgagcttgtgttccagggcagagggccccagcgcctgtaggtgcagacagcgcacccccaacacccccgagtttccgcctcctcatctggagagcggggctggacaggatggtttttggggcttttttgcaagctcaccggggccaagtgagctatttccccttgccattctctcccaggaggagaaggcataagatgatgctgaaggcacaggctctggaagaggacagggccatgcttattcctgccttgttatgtgattatggacaagccttcactgacccttggagtgatggataaaatccgtaccccacagggttacaggagaagtaagtgagggaccacgtgcacggagcccagcaaggtgctcaggaaacaatgctattgtttttcaggttacatcttggggagaccacccagaggaccttctttcaaggacaggtacctggaatttctctccctttcctacatcatcttcttgttttcatgcgcagggaggccaccactacctgagccagaccactcccttcttaagccagggcctgcaaattgctgcagcactgccccctcgatctcaatcagacacccacattcctgcccaccatgcccaaagcccttcattgaccaagaccctggcctcgtcccaatcctctgtaaagtacacatgcgtcttcaatccaccctacaggactgtggagccgagaagatgtggggctgagcatttacctttccataagttctccagggggttctgaggcccacagaatcaaagagccactgctctaggcaatgagatagtattctaaaacaattaatgaaggcccatgatggggacaggagagccattatgcaaattccggccattcgaggttattaatttgcaggagagactgtagacgctgggtaaagaatgcccacaatattaggcagtcaggaggctaccctgcagggcctgttcctgctccgcctggtgagcagaaaggtctcagggaccagctttaaaggatgacaggcctcccactgggtcacagggcacagctgccaggactgaggccagaatgaaggcgatcgcccatccggctcagtggttctcagtcttgggtcagcactggaatccccaggagggaacacggaaaccccgagagctggctccgcccctagagctgacctcagtaaatctgagatgaggccagagaaattgcatttcgacaagttcccaggtgttgcagcgcaggtgtgtgcatgcatgcatgcatgtgtacttgtgtctgtgcccgtgcatgtgtgtgttcccctgttttctgctttctgcagtgttttagctcagacttcctgattggggtcccattcttgaccagaggcccagtctagacctagaagaatactaatacatgcccagctgtttagagcccacaagccctctcatggcccttgtttccaggccccataacagccccataagtttgttttaaaagtgcatctgtaggggagaaaagatttctttcctcatccatcactaggttcatggctgaggcacctgtaacaaaagacagactcacaagagaaaagcaaccaagtaatttaagttttgtgtgacatgggagccttgagaaatgaagacccaaagaaacagggacatctatgtgattttttgccaagtttgatgaagaagcagataattgtggagaagtataatcggaaaatgggggtatgatttgatggtaatgacctaagtggcatttggaaggcctgtttcttcagattcttctctgcgtctctgcatcttcatagagaaggactttccttccctgtgggtctagggaaggcacctcttaaatgaaggtttcatgacccacttgagaataaattcaggaaattcttttatggcctgcttcaggggagaagggcaggagaaggtcagagagcgaccttccttcttctgtggttttctcaaatgccaaggtggcagatctgggacagtgtgtcctgaactccctcacaaccatggctgtctgcaggccagtcactcaacggccatgaatgtgtattgacttgtgagatcctccaaacaaaccttcaaatctctgctcacccccatttgagagaccagagatgagccaagagacatgaagcaaccttcccaagggagcagagccaagatttgaaccagggctgttgggccagtgagcaagggcttgaaatccagtgcagcacaggtatcttcctcagcaggctcagagacaggaggtggaccggccggagcagaacggaccctccccttcaaagcgggactctgcccttgagccctgagcagccactctggacagggtccacagaggaaggcaatcctccagcccgccatgcttcctctgacctcttccctctctcagatggaactgcaagaagatcccaaaccatccaggtttcccctacctctgggcctttgcacagccttcagagcagccctgaggtgatctcctgggccatcagcacatgaccgaacaaaccttgggccaccaagctccttccccggagttggctctgaggccaatcccccgatttcacaccattttaccattcctagccttggtccctccacagagccccctgtttgctccccgctgtgcttcctggcaccagcctcagtatttccagaaacacatgcagagactcaaggcttggaggactggctttatcgagaggctctggaaggctctctgaccccagtggaatttggctctctccgtccctccagatgttactcaggccccaaaccttgcccagccttgttagtggcttctccttcccacacaggctgtgccaccccttctccctcagcctggaccccagaccagtactgagcttttcctgtcagccccttgggtcactgcagacaaggctctagtgttcaaactctggcttgagctcagagcagggcccactctgggcttgaaaatacctcgtgtggggacagcagggcacactggagaggtgaggagggtctcctgtcctaggctgaggagctggcccagaggcagccctggcctcctcgccactcccctgaaatcaattcctcatctgagggagctttctaaaataaaatttaaaaattgcccacggacctgcccagcttaaagcctttgcaaggctgctcttgaccccagcatgaaacccaagctcctctccatcctggctgccaaggccccaagccactcgcccagcccaccagcctcaccacactcccatagacttccccactcttgggtgggggtgggagggctacacgaagctctaaagtcagcccgtgctctttctcacccccaagccattgcacagcctgctcccttggtctagaacactccctgtatctgacttcgacatgtttcttcctccaggaagccctccctgatgccccattccccctccaaggactgcccagcatctggagcaccctgtaccgagcggcacactgtggtgctggaaacatccttgttgtactcctctgtgcctggacactgcatgtgggcctgtccatacgccacccagacccctcgggtacctttcaccatttctgagcactcttcccctggcttctgtgtgtttttgcttctaagaatctgttgggaagaaaatattccctctctatcaacttagatcctagtggtagggtggagggctacaaatcaactgacaatggacagattcacaggagaaaaaaacaatcagttgtactcacatgcctggggaagactgaacagctgggaataagggcttctatacccacttaataaaccgggtgaactgaatggggttagggctgctgtggaggcccaggaatcaatcagaagccttcagctttcacctcccatcccccgttccctgaccccatgccaccagatgcaaataagaaggaaactttaattccacaaattgaagcatttatgaagctcagcaggcaacctggcaggcaggcaggcacaagtgaggaacaagggccccgggctgggctgccttccaggcaggtcccctcgacacaggccactgcagctctctcctgcaatgtgtcaggagagcctggcacaatgtgggggacgggggcgggggggtgcggagcttggcaccacctggtggtctcagctgccactccacacgtaggaggctggatgcctgctggggcagaaggcggaatccagcctgaccacttagtggggctcatctacgcaagccttgggagcagtggcaggctgctgtgaggggcgcgctagcctgaggaaccctcagcctcagtactcctgggtcgagctgcaggagcaggcctggcaagtccctaaggcttccagcaacattccccttccccaggcttggcagtgccagcccacaactcagtcatgggacaccaggtgggctcctttcttgtgggcctggggcagtctgctgagaagaagtgggcttgcagccttgagggggattagatcctggaggagaggcccatcccttccttcatacaaccggggtatggctggctgtccacaggcggccatccccgtgccacaggctgagttctgtcttccccaaactcacgtgctgaaggcaggaccttgcaatgggactgttcttggagacagggcctttaaaggggtaactacattaaagtgaggtcattaggttgggccctcatcccatgtgacttgtatcttcatgcgaagagaataagacatagacacacacacaaaggtaagaccacgtgaagacacggagaaggcggcgtctgcaaaccaaggagagaggcctcaggggaaaccaacctgctgacaccttcatctcagacttccgggctccagcactggaagaaaatgaatttttgtttaagccgcccagtctgtggcaccttattatatcagcctgagcaaaccaatacacaagggcccagatacctaaacagaaaagtgtgataaggccatttaaaccacaaatacacagcgggggtcccagatcccagagcagggtctcagttatttcacagatcacaaaactgaggatgctgaggaagggggcctccccaaggccacacaacaacttggaggaaacacggaactgaaggaaattgattcccaggggagggcccttgcctgaccccctcctaggggagagtcagagggtttccaggagcatgaggatgctgagactacaggactacagatggagggtgtttcatggctgagtgaaggggtagaagccaggcgagtatgacacaggatccctcttgacagaattagaacacagagatctggagttcccatcatgcccctaccacagattcatggtggaaacttgggcctcatctgcttatctctgaagtgcagaaatttatagcacctacctccagggagagttgggggttaactgagatcacgatgtacaaacctgtaagctgtaaggcaatggaaaagtggagggtatgtccttggatgaagcttccgctctggacagcatggaggacccaggagtcaggctgggctgctggctcacaggtgttctctccccctggcccaatgccctggttcccattgccgtctgagctcctcccttccatgtctctgttcttgcttccttccctcggtctgccgtcgccctttgtcagtgatcagacgtgaccatgggtaacaggcatgaattttagtctctgcatgctcaggtgtgtaagaaacatggcttcctttagttcctataactaaactttattttcagtttgcactgatcttcctccagctgccctcccagcccagcagggcctctgccctggcagggatgggatcagaactcaaagcccctttcatgcaaccgtgtgtgcacagttacacacagatctgtctaaaatctaactagtaggaagcagtgagaacttggtgctttgtagagaggctttgtgattcagataacagggctagctccagggagtgtggaacaaacgagacccctgagggcacagacacctcagagcatttgtacctctggtgctggggaggggtggggggcccatctgtgagcctctggtgcccatgtgcccacgtgcagggtttgtatctttgtgcactttgtacctctgtgtggcaggcgatcaatggtgtttctatctcagccagggactcaggtgcgagactgagaagcccaggaggcaagaggcacctgcagccctagagcccactgcagattttccttgagggccgtatatccagaaccatcccagggcttggcttttgagagaaaatgtagtcttaaagaatgaacaagtgggccgggcgccgtggctcacgcctgtaatcccagcactttgggaggtcacgaggtcagaagatggagaccatcctggccaacacagtgaagccccgtctgtactaaaaatacaaaaaaactagctgggcatggtggcgggcacctgtagtcctagctactcgggaggctgaggcaggagaatggcgtgaacccaggaggccgagcttgcagtgagccaagatcgtgccactgcactccagcctgggtgacagagcgagactccatctcaaaaaaaaaaaaaaaaaaaaaaaagaatgaacaactgctgactactgtttactacaataagcatagctgatactctatccaggaagaggaagccaccactcagtgccccagccaagattgttctcaagcttttgtccgtcccaaacctttatgaagcatcctcacccactgacatgtgcagtacttaagacggtgcaccctggagtcaaatcccagcttggccccacatgagctctgaggcccttgaggagacagcgttgcaaagaccccaggggccgagtaagcagaggcctttcagagatcagagaaaaggccacatagctgggagcctttgtgaaactggagaggtcatcggggccagatcctcaggggcccagtggccctggaaaggaatctggtcttgtacctagaaatggtggcattaattatgtgactttgtccaagtcgctgtcctattctgagcttcagttttcttgtctgcaaagggctctggaccaaaccatctaggatccaccctgaccctgggccttcatgtcaggttaaggagagacagggcctcgttctgcgttcaggatgagtttctccagggaaaggccttctagctccgccctgccctgtctggctctggggaccacgcaggactctcaagacactaggtcactacactcaggagtttcccatttctgccaagacaatctggagaagacatcaccccacttgagtcatgagatgtcctcaacagcaccttctagagtgcagatctttttgctgctgtgagagaggggcttatgcagaatgatattgtcagtgtagacatgtttcacacagaggagaactcaggacaggggacaggaatggaggcaggaactcgatctattagaacaagttttctgatgtggttatgcatcagggatgtagaatcctgtgccttcaggatttctgggattaaagacaatcccagaaaacaggcctggacaggtcctggaatcagccccaggcctatttggataggggattctggggtcctcgtacccagagcctggtctagacagaaggagggagtgggctctgggtgggcaaacccaccttggccctttcccttccctcatcctgtggggaggggctcagctagtggagggtcagagagggtctaaagcaggggttccatggtaggcacccctcttgtccagacccaaaggtggcttggatcaccaccgaggcacagctgagtgataagttgatgagcagctgtgttttgctgccacataaaaatggctcattccccaccccccggccctgaagtgactatttactgagagaggcaaccctactgaacaaaagcctgctatttattacacgttcggtgaacaccccacagttccaatgcatggggagggcttggaaaccaaatcaaccttgggaaaaggaggtgcagaggccaaggtcaaaaccaattcatggaagtgggaagaaagcagggctggcctcaaccttttcactattagagagatggccatgtaaagtagtgagcctcctgtggaaggcatatgcaagaacaggtagaatgattatttcttaggggttttgtagaaaggattccttacacacaaaggcacaggattctacatccctggagcataactacatcagaaaacttgttgtaatagattgagttcctgccaccactcctgtcctcgtcctgagttctcctctgtgtgaaacatgtctagactgacaatgtcattctgcataagcccctctttcacagcagcaaaaagatctgcaccctagaaggtgctgttgaggacatctcatgatgcaaatgaagcagctgcttgcaggagccatggaggggcttgggcagcaggcggggggtgcccacaggcatgtgcccctccagaaatgggcaggaagtggaaggaagagaaagggagtcaggcccagggcaggggtgggggctggggtctgctttctccacactgccaggttctggtgaggacctcccaggtgggtgtaaatttgcaaacccaaatggttaagaagatatatctgttaatgtagaacattttgtatttaaccagtaattgacttgattcataactttaagtatgcagatgtggtaagtggacctcagtattagcttcctattgccactggaacaaatgaccagaaacttcgtggcttcaaacaacacacctttattatctgacatttctgggggtcagaaatccaaaatgactctccctgggctggatccgggtgttggcagagctgcgttccttctggggtcctgggggaagcctgtttccttgccttttccagtgtctagaggctgaccccattctttggctcatggcctcttcctccgtcttcaaagccagcagtgttgggccgagtctttctcaggctgctacctctgttctctctctcgtgcctccctatgtcatttgtcaagacccagaggattccacaggcctacccagataacccggggtaatcttcccactttaaagccagctgattgacaaccttaatcccatccacaacctctgtgaccctctgccatgcaaggtaacatactcacaggcatagggatgaggatgcggatgtctttagagggccactgttttgcctaccacagcttccatttggattcttgtcccaacccctacaaaagtgaggcatataatttgttgaattctgaataaaatgctaccagtgtctacaaattatattttttctttttttaaaaaaaaaaaaaaaccttcttccccaagtctggtttcctttagacctcaggactaagtacctgagaagatctgcgggcaaggatagttatgtgattatctggacagaatggcatttctgattgacattgttgcattactttggctccagatgcagtggcctgagagcagaaataaaaccccctccagctgcctcagcccaccctttgcagagggagaattgagttggggccacacggtgggaagcactaatcctcagtccacacaaaccctcgctttccaattattttgatggaagtcatgaaagagcactcagctaggcattattaatccattttttcaattcagcaagtattgattgagcagctaccctgtgccagtgaggttggaaacacaagggtgatgaacaaggtacatgtgcctggccgtcactggccagctctgtcactgcaggcgggaactttccttcctgtggggcccagggttttataatcacatgagcacctacacatccggtacagagccccgttaagggggcagggcctggcctgcctccttcactgttgtctccaattgcctcagatgcatgtggatgctcattcgttgaatgaatgaatgaatagatggtccttgctgatcggagagtcaatgactgtatcaggccaactggaaaagcagagggcaagccaagagaagacttggacagtgcctgccaccatggctgcgagtgagaggactgcggatcccgaggtggattcctggggtggcagctactgtttacaaagcactttgctggtatttattaggccacgcagttcccttccaagtttcctcctgttatcattctcactttgcaaatgaagaaactgaggtactgggataaaacttgctgaagaccacatggctagtaagtgtcagagcttggatgtgaacctgaatgctcgctgaggagagagcagctcgcctccttccctcacaggcacatagtcagccttcccgaatttcatccggcaacaattaacctctcccttctcactatcccccgctccctttccatctgtagagatctccttggatctaaattatcagggcctaaagccaggccatactaccgaggttaaagaaggtgaaagggctgcattgggcaacattgttccttcaatcctaactctttaatcctaattcatcactgcacactctgctcccttccctgggtgaagacagtttgatttgcccagtatccagaaagtttgtgctaagacaagggaaattgccacatggctctctgtttcattcagtccttcataagcatgcagcctgacctggagaaactgacagtgtaaaatgcatggagcagctcctgtccctctctttcctacccttgagcactctctaagcagtagctggccgatacagtcgcccaggaagtctccctgtagctcggccgtcagtcattaccctcactggcagcacgggacagagaacgggatatgttctccccttttattttgtgtggtgagacttggaaaactctgcgcctagaaaaatccatttctgaaggttgctgctattgagtagtgcagtgagactgggtttgaaggtattggactcttacataggctatgtgaacgtgggcaaattgcatcttctctttgagaagtctgagctcaagtcttgctttgagttatttgtgtactaacctttgaccttgctgacaaaaaaaaaaaaaatcacagtgctgggtacagctcctgacactccacctcccctacttcttttttagatacagggtcttgctctgttgcccaggctaaagtacattggtgcaatcatagctcactgcagccttgaacttctgcctcaaacaatcctcccacctcagcctcacgagtaggtgggactacaggtgtactagtatgcccagctatttttatttatttattttgctgtccatcctgatctggaactcctgggctcaagcaatcctcctgcctcggcctcccaaaatgctgggattacaggcatgaggcactgcacccagcctcaacttctcccacttctatcttctccccagttctaggtgaggcaggacctgccacatgtccaaatctccatctgtccccagcactctactaaatggcttaactgggccctcacgtccctccctggggatcctgtgaaaagacttgtgaacctgctccaggtcctgactgaaccaaatttcctctctctacatgccgaaagagtaataggtgttcctgcattaagcaatggcttaatttaggtttattttcattcttcagatatctctcccatttgatgtttcacccccttgaagctcaggtgaatctccatcttcttattcatctgaatattcctcatgcctggcatcacgcctcactcatagagtaggaattcaaaaacatcccagtaggagctgggaaagctcctactgcatgtcttgtacatctgctgtatgccagctgggaaagctcctactgcaagagagaggcaaaccacaaaggggactaaggggaagaattgggaggggggcatttattgccccaaatgactgaatttgggtcaaataacaggaccacgggcactcacatgttcaagttatgttcaggaatcttcctgttttctttatgaagcagaccctacctctcatcataaagctggaaatgccacgttccctccattccagcctctcttgcagctatggtgagcctaaatgagctagactcagtcaatcaaacccttctgccctagagtttgaatgggaagttctgacttgaagaattaggaaccacacaggaccccgtttgtgaagggggtggcacaaggtgcgtggcctctagctcccaggggcagcatccagaattcagcctcagggatgttggtcatgcaagccaccaaatcagtgccagcagccaagacgggggtgtcttcacagggccagtttcgtcatgttatttcaagggttgctcctggcccgtagcctctgaatttattttagtttctcagagatttcagtgggccaacgaatgtcacttaatcgatcccttttctgcttggaggagccagactccgtgtttgttgcttacaaatgagaccttgactgagacaagttgtcttgagtttccagttgaagtcatcctattccctttcaccttgaggcctttgcacatgtcatttctctcacctggagcaggcattcaccctctttttgtgactggatgactcctacccagtcatccaagggtcaggcttgaagactcttcccctgagaagccctcccagatcaccccaaatctgggctcccacaccaccctgcatgttcctcttagtagcatcctgaccctggattttactgtttatttctgtgtttcctcactattctgtgagctgcatgaggacagaagtgcatctatttcatcattgttagtagtagttagtatagttgcccagcctattgatattgttgaatgagtggatggattgaactctcttaggccagagtgatcccccactatcactgcctggcagcatggagcagcttcagtttttggactcagggcaattgccctgttccaggaaaccccaaaatagagttgcctcatttcacttctaccagcatgtcttgtacatctgctgtacgccaggccccgtgtcctcttacgcccacatcccagatcctgcaggtagaagtgctcacattgctgtgctcccttttctctgaccagccatggaggccctgggggcttggaggagtggctgcttactccctgggggaagtgtgggctgcaagccccttgagtgggcaggttgccatggtgatgctaatggagagacttgcctgaggaatactgaccaccaaaaggaacaattaccagagaaggcccatttctttagcaattttcaagaatgggcaagataaaaagccacaagtgaaaaggcattgcaaacaaataatagtgtatgagctggtctggacccaacaaggcctgtttcccacccctctttccctctggttgtagtgaataaagccatacttttcagtgatttataactgttcaaaaatgactcgtttccatatcttctttcatctacccagcacccattatgtaccaaatgcctaacagacacttaaaatatactctataattatgaaaacaaccctacaaggtaattgttcccgtattacagatgagaacactgaggctcagggagtgtaagggacccgtctagggctacgcagctgggaagcacatgcagcactctacttcatgcttaattcaaggaagcgaattctccttgtgggttaacatcatcacagtggcaattccagtgcctccataagaaagtgtccttggaaatgagacactagccctctcctgtctcatctgcacaatatcctattgccatctatttagaagagaggtagtgagttggttcattcattcattctccatttgttcattcatacacatttattacactcaaacttctagggcaaaaccagcaagccccgtactggacacttcagactcaaagatagcaacttgctaagttacaggagcttcctcataattgctgagcttctaagctctttgtcccaactcctgaaaagtagccctcaacttccaaactgtgcttcgggcactgacattccctgagctccacacacccttggaccacagttttctgaggcccagatgagcacaatgtgcagggcagagcctggcacttccagggctccaaggagtccagaggaaaatcgggcaggtcctgaatcaggctgctgtaggttgaactcctgccccacttagcagctggatgatgtgcaaattgctcagcctctctgtgcttcagtttcctcacctataacctagggctaaaaattagaagcacctactccatacagctattgtgctgatacaatacaataatccacataaggaacttagaacagaacagtgccggcggtgtatgttaaatgctgagtggacaccagttgggattagaagtagcagcattgccaggtactcctgagcaatgggtcagctaattccactctaccctcagaccccaccctcctttgcagttccttctcctgctttgataactagaagcagtcatatagggcctggggtctctacttgtaggagttcagtcagggtggtaggaaaaattataaaaattatagaaagactcaaaccttcttggaaggccgggaggttttgcaaaagttttgggaaaggatttggctgaaggcagctgaattttctcagagtaaataacaaggaagtgtaagggaattaatctagataagttagtttacttaggccttgaaacatggcctttaatcatccatgctcaggactgctctcttgggggaaaggatcgcccgaccccccaccccaccctcaccccaccccctgccaccatgttaattacccacaagtgtgttgactcaaagcctttgtcattaaatctgtactgaatatatgcccacagcaccagcttgtcaaggctgcagctgctgactctttacagcaccctcctcggtgcctgtgagtggcccagtcccttagccgtgcagccaggcaaaaaatctgtgtctgcatacattttttcatccatcactcagccagggtctgcgggttggaccccgcatctactcacaaatcaagatgttcagttccgccacccacccctgtctgtcttcctttctcacagtcactctgtaggtgtatcctgaaaatgtaaatcagaccacagcattccctagctgaaaacccttccgtggctccctattactcaccataggctaaattccgcccagactcctctgaagggcttgcaaggcctcctgtgttctagctcctgcctgctatccacccacacccctcattcctgcccctgtaaaccccttgtagctctcacatctcaagaattaaagatttgacccagttgctccgaccacctccgccccgatccccagaaacagtttcccccttctctttctctggccaacttctatcggttttcagaatgtctcccctggccacgcaggatcccttccattttgaggctgataaaatcctgcggatcgcaagctgagcgctcatcacaccccatcgtgattatctcccctgcaaggccaggggctttgagagggtgggactgtggctgacacgttcagtgctccagtcccatcacctgacacttgccatagagaaggtgcttagtatttagaagagtgtgtgcgattaccgagagcatggatatgaagaaggggatcacaaccttgaaaaagtttgttgctgagaaagaggcaagcagccccaactgacgggagctggcctggtcctcacagtttgtctcctgttgaacaatttcacagaacattgacatcagacaaggctattctgactgtgttggagcaagacaaaatcgagagcacttcgtagtcatgtctaaacgcagataaaacaagaacattgtctaaaccacaaaaatgaccagacatcccgcttttttgggctaatgggagtaactgtttaccaatgtttataatgttggccctgcactagtccttctaccttatagataagattataggtacccaattatagaatgattcctactgcctgatggcatccaattgaaccctccctagtcacttaacacaagcccccatccttttgtaagttcttcgtaacaccctctcacaaagacccctcactgttccccacagtgcacaatctccttgctgcaatgagccaataaacccagctccgttcaactgcaggtgtgttcctggtctttggctaaagggcattgacaccacccatttcccagaaacctgaacttgcaaaaaaaaaaaaatacctaattaaacaatttctgcaagctaattgatagtgagaaatgtatttctgatagggagcatcagctggagtagacaactttgtacatactatatgttttccggacagttgcttcagcttctcctgcattgtgtgtgtgtgtgtgtgtgtgtgtgtgtgtgtgtgtgtgtgtgtgtttgcagggggaagatgcaagctttgctgtcctgggtgtccgtgactgggcatgtctcatctggaaagagatcagctaatattccttgagaaaaagaatgttatcactggatgattacatctgcttccagagaggtaagagcatgcagcatggagcagacactctctatcccaggagctgccctgcccaggcctgggctggtggctattgtcatggagtggtaactgtaaggccatcctcataagtcctgctgatatcactccaatccatggacacccctgtgactccgtctccattcctcaggcctgcttcccatggaaagacccagagggaaacgtggttggtggcattggggactgagaacagaacaaaattcaggctttgagtgtggattagagacgcactgtgtggtgcttgcatcacctctgacagtggttgggtaatgggctgaatcacccaatggagacagaatgccaacagatgttagttgaggaggatgattaatctccttcttcgaaaactcagagaatctttattggcaacgttgaagtcaagatagggcttctccttagcaaccggaaagcgcctagtgtgcatggctacagaattcaatatgaaactcagatgatgaaggtagccatgggcacctctgattgcccattgtaaatttctgcctggaatgagggctggggcctcataaatgtcaacaaaagctggtgatgggtccagagagggatgttaggccagccttgatggatgaggaagtttcatttaggggctcctgtcacttcccatcttcaggccaagctgacatccatggctgtaaaattgtcacccttctcctttgcctctcaggaaagcaaaacttctttacgacacttttaatcaaatctgtcttttgccacttctctccccaccctgctccctctgcctttatcctgacaaagaagcgaactgttactctctgtcagttatttgtctgagtaatttcttgatgaaattgcaactataattgaattttctgaaaaccaggaattcaaatgaggcgacaacagaggaaacagcgtgattaaggaattgttattcactcgttgtacatcattaccacccagaattcatcgctggatcgttcacagatggagttgctgaactatgattatattttagaaaatgaagggggaaaaatctaaaaaggcaataaaacatattagaagccttcttgaggaacaggattattactgattaagtatattttgcatgaaaaatgtgctagcactttggcagtttaaattatacgtccgtgcagtcaacatttttgctggtctcaaaattctttgttagtttggtcttctaatcacattcctcttcaccctccaaattgacgacttgaaagaacattagaaatgatcattcctgaaggagcatttgctctcaaaatgcatttacgctcagcagccattaaaaggatatcatccagtcacttagtttctcaatttaactttaaaggaaagttgccttattagagaagtggcctctatttcaatgtaatggtctttgtcacatcttccaatgtgctggcttagtgctgaaggatggggaaaggcagttttcacatattgcagccaccataccaccaaagaaaacaggtgcacttccaggcatcatttagcggggtaccacattcctggttccagtttcctttttagaaaatctgaaagtaactttggggcatatcttttaaggagtactccaacacgactagtggacagaccctaaattaattgccaatcagctctgccttctggtatttacacctttatgtaataacctccacttgaaggtagatgagatctgtgacttgcttctaaccagtggaatatggcggaggtggtgggacgttactcctgtgattacattacatcatgtggctcctttatgatggaagattcatgctagagattctccttgctgacttgacaaagtatgtaaccatgatgaagacttccacgtggcaaggagctgtgggaagcccaggtgctgagactggcatccagcaaacacccagcaagaaacagacgtccttggttctacacatacaggaaatgaattctgccaacatcctgagtaaggctggaactagattctccccaagttgagcctgacaagtaaaatacagaccagccaacaccttgattgcagtcttgtgagacctggggaaaaggacacagctgaaccgtgtccattcttctgacccacagaaactgtcacatcataaaggtatgttagttgttacacagtttagaaaactattacagctgctcaagaaggttagctagctccagatttcaatccattcacaggaaagcaagctttattcctagaagaataattcatgctttgcaaaaagaggaaaacgtcctgcagttttagaaggtcttttctttctcaacacacccaaatttctttaaaatcctcaagaagtgcatttgttttcatggttgactcgaagaagtgagtataattaactcacaaaaggtgggaggaagggacaaattaaattttggtatgcatacaggtagcttcttccaagtgataatgagcaatgtgaaacaaagagattggcattaaatgtaatgaaggactagaggagtgtacctaaacctgaaacaaattccaagaagtggccttgacctaaaatgtttgcatcctgccagagacccttacttataagtcaggagatacctgatgcccaggagaactggtttttgtactctgtcttacacagactaagaattaagaatgcaggtgagaagtttagaaaacttcctgatgatcatatgaaaagacattaaactttacctggtaaaactatgaaatgttgcctgtagatttctaagaaaaatgagtaggaagttggaaatatttcagaattaagaatgtttttatataattagaactctttaagctatgtaattctgaaatctgtgtgacagacttctgtgtaaacataaagaactagttatttttacagattatctagtctgtgtattcatttgatgtttctattacttttaccctcactacaaagttcaatgaaggttaaaaaaatattgttcttaaaaaaagaagagataaacctggagtagctatttcaatgttagacaaaatggattttaaaacaaaaatgttaatacagatagaaagggacattttataataataaaagtatcaaaatatcaggaagataccacaattataaacaaatatgctcctaaaaatagaatctcaaaatacataaaacaaaaactgacaaagttgaagggataaataaataggcagctcagcaatatttagaaacttcaatacctcactttcaataatggatagaacaactagacataagatcaacaagaaaatagaatattttaacaaagctatacaccaactaggcctaatggatatctatagaataatccacccaacaacagaagtcttcctcctcctacttctcctcctcctccccttccccttccccttccccttcttcttcttccttcttctctttctccttctccttcttcttcttcttcaacaggatcttactctgttgcccaggctagagtgcagtggtgtgatcatggctcactgcagcctcaacttcccaggctcaggtgatacatgggcctcagcttcccaaagtgctgggattataggcacaagccacatgcctggcccacatattcttcttaagtacacatcaaacattctgtagaatagaccatatgctaggccacaaaacaagcttcgataatttaaaaggactgaaattatacacaatctgttccttggccacaaagaataaaattagaaagaacttttggaaactcacaactatatagaaattaacatacccataagtaaccaattggttgaagaagaaatcacaaaataaatgagaaaatactttgagatgaatgaaaattaagacacaacatataaaaatttatgcaatatagctaaagcaatgcttagagggaaatttatagctccacatacctacattaaaaatggagaaagttacactgttggtgggactgtaaattagttcaaccactgtggaagacaatatggcgattcctcaaggatctagaaccagaaataccatttgacccagcaatcccattactgggtatacacccaaaggattataaatcattctactataaagacacatgcatacatatatttattgaggcactatttccaatggcaaagacttggaaccaacccaaatgcccatcaatgatagactggacaaagaaaatgtggcacatatacaccatggaatactatgcagccataaaaaagaatgagtttatgtcctttgcagggacatagatgaagctggaagccatcattctcagcaaactgacacaggaacagataaacaaacaccacatattctcactcataagtgggagttgaacaatgagtacacatggacacagggaggggaacatcacacaccggggcctgtcggagggtggggggcaagtggagggagagcattaggacaaatacctcatgcatatggggtttaaaacctagatgacaggttgataggtgcagcaaaccaccatggcacatgtatacctgtgtaacaaacctgcacattctgcacatgtatccccaaacttagagtaaaatttttttaaaaaaagaaaaaacatctcatatcaataagctagacttctatcttaagacgctaggggaaaagcagcaaactaatcctaaagcaagcagaaggaagacaataatgaaagtggaaattaatgaaattgaggacagaaaaacaatagagaatatcactgaaaccaaaaagtggttcttgttttctttctttctctttctttctttctctctctctctctttttctttctttctttctttctttcttgtttcttttgagacaaggtctagctctgtcactcaggctggagtgcagtggtgcaatcacagctcactgcagcctcgatctcctggacttaagtgatcctcctacctcagactctcgagtagctggaaccacaggagtgcaccaccatgtccagctaatgttttcaattttttgtagagatgaggtttccctatgttgcccaggctggtctcaaattcctaggctcaagcgatcctcctgcctcagcctctcaaaatgctgagccaccacacccagctggttatttcaaaagatgagcaaaagtgacaagcttttagctaaactgaccaagaaaaaaagaatacttaaattaccataatcaggaaagaatgagagaacattactaccaacctcatagatacaaaaagtatagaggaatacaacaagccaattgatatgccaacaaattaaattacaaatgaaatggacaaattcttagaaagacacaaactacaaaaactgactcaagtagaaatagaaaatctaaataggtatttaaaaaagattattaaactgagagctgaagacagggcagcaaaactgcaggggccaccaccaccaccaccacatgtcaggaagagtacggagaggccctggaggggcataacgactgcaggaataaattaggagagccaagagaacccacagaccctctgaaggaagtggattgctcctgcaggacctgggagacacctcaaatactgtgctggtatctgtggctgagaaacccacagatggtttgcatcacaggactctgtacagacaacccccagtaccagcctggaacctggtagacatcctgggtggctagatccagaagagagataacaatcactacagctcggctctcaggaagccacatccctaggaaaagggggagagtaatacatcaagggaacaccccatgggacaaaagaatctgaacaacagcctcgagccctaggccttccatctgacagacactacacaaatgaggaggaaccagaaacccaactctagtaatatgacaaaacaaggttccttaataccccccaaaaaatcacactaggtcaccagcaatggatgcaaaccaagaagaaatccctgtttcacctgaaaaagaattcagaaggttagttattaagctaatcaggaaggcaccagtgaaaggcaaagtccaacttaaggaaatcaaaaaaatgatacaacaggtgaagggagagattttcaatgaaatagatagcataaataaaaaacaatcaaaacttcaggaaacaatggacacagttatagaaatgcaaaaggctctggaaactctcagcaatagaattgaacacgctgaagaaagaacttcagagctcaaagacaaggttttagaatgaacccaatccaaaaaagacaaaggaaaaattataagaaaatatgaacaaagcctccaataagtctgggattatattaaatggccaaacctaagaataattggcattcctgaggaagaagagaaatctaaaagtttggaaaacatattcgggggaataatcaaggaaaactcccccagccttgctagagccctagacatccaaatacaagaggctcaaagaacacctgggaaattcattgcaaaaagatcattacttagacacattgtcatcaggttatctaaagttaagatgaaggaaagaatcttaagagctgtgaggcaaaagcaccaggtaatctataaagggaaacctatcagattaacagcagatttctcagccaaaaccctacaagctagaagggattggggccctatcttcagcctccttaaacaaaacaattatcagccaagaattttgtagccagtgaaactaagctttataaatgaaggaaagatacagtctttttcagataaacaaatgctgagagaattcaccactaccaagtcagcactacaagaactactaaaaggagctctaaaccttcaatcaaatcctggaaacacatcaaaacagaacgtctttaaggcataaatctcacagaaactataaaacaaaaatacaattaagacaacaacaaaaaacaaggtatacggacaacaaatagcatgaagaatgtaatggtacctcacacctcaatactaacattgaatgtaaatggcctacatgctccacttaaaagatacagaattgcagaatggctaagaattcaccaaccagctatctgctgccttcaagagactcacctaacacataaggacacaaataaacttaaggtaaaggggtggaaaagacattctatgcaaatggagtaactattcttatatcagacaaaacaaattttagagcaacagcagttaaaaaagacaaagagggacattatataatgataaaaggccttgaccaacaagaaaatatcacaatcctaaatatatatgcacctaacactgaagctcctaaatttataaaacaattactaatagacctaagaaatgagatagacggcaacacagtaacagagggggacttcaatactccactgacagcactagacaggtcatcaagacagaaagtcaacaaagaacaatggatttaaagtatatcctggaacaaatggacttaacagatatttatagaacattctatcaaacaactgtggaatatacattctattcaactgcatatggaactttctccaagatagaccatatgataggtcacaaaatgagccttgataaatttaagaaaattgaaattatatcaagcactctgttagaccacagtggaataaaactggaaattaaggccaaaaggactttctaaatcatgcaaatacatggaaattaaataacctgctcctgaatatcactgggtcaaaaatgaaatcaaaatgcaaatttaaaaattattcaaactgaatgacagtactgacacaacctatcaaaacctctgggatccagcaaaggggatgctaagaggaaagttcatagccctaaaggcctacattgaaaagtctgaaagagcacaaatagataatctaaagtcacacctcaaggaactagagaaacaagaacaaaccaaacccaaattcagcagaagaaaggaaataaccaagatcagagcagaactaaatgaaattgaaacaaaaaaattacaaaagataaatgaaacaaatagctgattctttgaaaagataaatacgattgatagaccattagcaagattaaccaagataggaagagagaaaatccaaataagctcaattagaaatgaaatgggagacattgcaactgaaaaccacagaaatacaagagaacattcaaggctactctgaacacctttatgtgcataaacttgaaaacctaaaggagatggataaattcctggatagatacaaccctccttgcttaaatcagggagaattcgataccatgaacagaccaataacaagcagtgagattgaaatggtaattaaaaaattaccaataaaaaagtccaggaccaggtggattcataccagaattctaccagacattcaaagaagaaatggtaccaatcctactgacactattccacaagatagagaaagaaggaaacctccctaaatcatcctaggaagccagtgtcatcctaataccaaaaccaggaaaggacacaaccaaaaaagaaaactacagaccaatatccctgatgaacatagatgcaaaaaatccttaacaaaatgctagctaaccgaatccaacaacatatcaaaaagataatccaccatgatcaagtgagtttaataccagggatgcagggagggtttaacatatgcaaagtcaataaatgtgatacaccacataaacataattaaaaacaaaaatcacaggatcatctcaatagatgcagaaaaagcattcaacaaaatccagcacgcttctatgattaaaactctcagcaaaattggcacacaagggacatacctcagtgtaataaaagtcatctatgacaaacccacagcctacataatactgagaactggaacaaagatgcccagtctcaccactcttcttcaacctagtaatggaagtcctagccagagcaataagacaagagaaagaaataaaaggcatccaaatcagtaaagaggaagtcaaactgtcactgtttgctgatgatattattgtttacctagaaaaacctaaagatgcctccagaaagctcctagaactgatcaaagaattcagcaaagttttgaatacaaaattaatgtacacaaatcagtagctcttctatccaccaactgcaaccaagctgagaatcaaatcaagaactcaacctcttttacaatagctgcaaaaaaaataaaataaaatacttaggaatatacctaaccaaggagatgaaagacctctacaaggaagactacaaaacactgctgaaagaaatcatagatgacacagacaaatggaaacacatccaatgctcatgtatgggtagattaaatattgtgaaaatgacaatactaccaaaagcaatctacaaattcagtgcaattccatcaaaatactactatcattcttcacagaattagaaaaaaacagtcttaaaattcacatggaagcaaaaaagagcccacatagccaaagcaagactaagcaaaaagaacaaatctggaggcatcacattacctgatttcaaactatactataaggccatagtcacccaaacagcatggtactggtataaaaataggcacatagggttgggtgcagtggctcacacctgtaatcccagcactttgggagaccgaggcaggcggatcacaaagtcaggagattgagaccatcctggctaacatggtaaaactccgtctctactaaaaatacaaaaaattagccaggtgtggtggcagacgcctgtactcccagctactcgggaggctgaggcaggagaatggcatgaacccgggaggcagagcttgcagtgagctgagatagagccactgcactccagcccgggcgacaaaacgagactccatctcaaaaaaaaaaaaaggcaaatagaccaatggaacagaagagagaacgcagaaataaacccgaacgcttacagcaaactgatctttgacaaagcaaacaaaaacatatagtggggaaaggacacctcattcaaggaatagtgctgggataattggcaagccacatgtaggagaatgaaactggatcctcatctctcaccttatacaaaaatcaactcaagatggatcaagggcttaaatctaagacctgaaactataaaaattctagaagataacattggaaaaccccttctagacattcgcttaggcaaggatttcataaccaagaaccaaaagcaaatgcaataaaaacaaagataaatagctgggacttaattaaactaaagagcttttgcacagcaaaatgaacagtcagcagagtaaacagacaacccagagagtgggagaaaatcttcacaatctatacatctgaccaaggactaatatccagaatctacaacaaactcaaacaaattagcaaaaaaaaaaaaaaaaaaaaactaccaaaaaaaatcatcaaaaattgggctaaggacatgaatagacaattctcaaaagaagatatacaaatggccaagaaaaatatgaaaaaatgttcaacatcactaatgatcagggaaatgaaaatcaaaaccacaatgtgataccacctcactcttgcaaggatggccataataaaaaaatcaaaaaataatagacactggcatggatgtggtgaacagggaacacttctacactgctggtgaaaatgtaaaactagtacaaccactatggaaaacagtgtggagattccttaaagtactaaaagtagaactaccatttgatccagcaatcccactactgggtgtctacccagaggaaaagaagtcattatacgaaaaagatacttgcacacacatatttacagcagcacaattcgcaattgtaaaaacgtggaaccagcccaaatgcacataaagcaacgagtggatatatatatatataaatggaatactactcagccaaaaaaaggaatgaattagtggcattcacagcaacctggatgagattggagactattattctaagtgaagtaactcagcaatggaaaatcaatcatcatatgttctcattcataagtgggagctaaactatgaggatgcaaaggcataagagtgacacagtggactttggggactcagggggagagggtggggagtggatgagggataaaagaccacaaatatggtgcagtatatactgctcgggtgatgggtgcaccaaaatctcacaaatcaccaccaaaggactcactcatgtaacaaaacatcacctgttccccaataacctatgaaaataaaaaaaataaaaataaaattttaaaactaccaaataacaaagaaattgaatttgtcattttaaaacttcccacaaagaacagcttaagcccagacagcttcactggtgaattatacagaatatttaaattaaagaattaatgtcaattcttcacaaagtcttctaaaatgtagaagaagaggggacattttccatttcattttgtgaggccagtattatcccattaccaaaccatacaaagccactacaaagaaaactacagaccaatactgcttatgaatataaacataaaaatcctcaacaaaatactagtaaactgaatccagcagtctgttaaaaagactaacaccatgaccaaataggatttatcaaaggaatgcaaagttggtttaacatttgaaaattaattaatataatacataattcaatagaaaagagaaaaaaacacatgatcatcttattagacacagaaaaatcatttaacaaaatccaaactgacgtcatgataaaaacactcaacaaactagaaatagagtggaactttctcaatgtgataaaggacatctaccaaaaatccacagctaatatgataaataatggtaaaagactgaatgtttttcctctaagatcaggaaaaatacaaggatgtctgctctcagcacttttattaaatattgtactggaagttctagccagaacaattaggcaaggaaatgaaataaaatgaactcaaattggaaaggaagaaataaaactatttccggatgataccaccttatatagagacaatcctaaataatccattattagaattatcagaactaattaacaagatcagcaaggttacaggatataaaattaaaattcctatacactagtaatgaataatccaaaaataaaattcaaaaaacaatcccacttacaatagcatcaagaaaataaaatccttatgaataaatttaacagaagtctaaaacttatatatactctaaacacgacaaaatatcattgaaataaattaaagatggaaataaatgcaaagacatccatgttcatgatcagaagacttatattgttaagatggcaatacttaatattataaagtgatttacaaattgatttataggttcaaagtgattcgatgcaatctctgtcaaagtttcatagcattttttgcagttatttatactgcaaagtgatttacagatttaatgcaacccgtgtcaaaatcccatggccatttttgcagaaatggaaaagctattgctggaattcatatggattgcaagtgaccccaaatagccaaaacaatcctgataaagaacaaagctagacaaagtccatcttgcacttcctgatttcgaatcttacttcaaagctatggcagtgaaaacattgaactgagtacggtaatatttatcatctcaaaacctcacaacaatgcagtcaagtggaaccactgtctcagtatttcagatgcagagcccaggctcaaagaaatatggggaattgcttgaggtcagagagctgggtaaccacaaatgcgggtccacattcagatctgccctaagtataaagacattgcatcctctcagccactacctacaccactcttgagtttcttcgacacaggacctgtgaacagacagcccaagacgcttgggaatcatggaattctaacccccaaagcctggcttagggacctcatccagcgaccagacagggcgtgttgtgcctcatccacatttctgaaagtgtccactcagtggacagcctgctttctagtctctgccctactggcttgagtgtggatgcccagacggttaggaggcaagctccagagctcccatatgatcacttccactgtcacctgtgtgccacaagtgctctctgtacacatgctccacctgttctgatgatctttcagtctttcaacttccaagccatgtgagggatccttcaggaacatgagcactgggacatgctggacgctggagagagatgcagacacccagagctggctgagctaacatgctacagtttgtgaggaggagacacaaaatttcatacagatgataaaatttttctgtacaacaaacctttgctatagatcctacaatatatccattattctcactagaatgtgaacatgattctgcaaattcctagggagaaaacccagcctgccccttatcagaggctataaaccacctgtttttctttccatcctccttcccttgcttccctctcacacatcagtcctttagagaaaactgagcttttccaagctgttattgctcaaagaaatgtcttcatccaagggaaccaagggatgtgaagggcactggcctccgaagcatttgccattgtcaacttttattgagcacctactatgtaccaagtactgtgctaggttctgacgacactgaagaaacaaaaaaatagatacttcctaatctcaagggacagtccactggtggagtcagaccttcatcacgcacacacacaaacacaaagagagagacagaaagagagagagagagagtgagagagaaatacatgtattcagatactgctctgaaccttatctgggtccggagggcagagaaggcttcttgaactaggacctaagaaatgggaagaaatttgctagttaagcaggtgttgggggaaggtcctcagaagaacattctagaacaagtgcaaggtcccaagagggagggagatggtccattcctgcaactgaaagaagaccaatgtttctgaaccacatggagcaggaggaagcagcaggagaatccaacagggggagggtcagaaagcccatgtttgtaactaaccggaacgatgaatgtggtttggaagacaagtgagaggatgtgtaccacgggccagatgtgggagaccaaggaggggactagtgcatttttccagtaaagaaataatagtgcttggggctagggaggctcaaattgagaagaagacaagtggggaggtttaagagagatttctaaattaaaatgtacagggaatagtgacagatgatgcatggggtagagagagagaaggcaatgtcaagagtgactcccaaatctggcttgcaaacagaatgaacggtggtgtcattcactgagaaaggacacccaagaggaggatgtgattagcaggggagagagcaggagttcaagctgatatgtagatccacattaatatgtctagtcagaatgtggatacgtaggtttggggcttagaagaaaggtctggggtgaagatctaaccctagcagtcatctgcaaagagatggtaataaaataaatacaatttttaaatggatggaatttccagggaaaaagcagagggtgaaatgagtaaaggatctagggccaaggctaaaagaaatccattattagaaacagaaaaggtgtcttagtgcattcaggctgctataacaaagtaccatagcctgagtggcttataaaccacagaaattcatttctcacagttctggaggctgggaagtctaggatcaaggtgcaagtgagagtctgccttctggctcatagatgctgccttctggctatgttctcacatggtagaggatgtacggaagctctctgcgacttcatttatgaggacgctaatcccattcatgaagactccaccctcatgacttaatcacctccccaaatccccacctcctagtaccatcaccttgagggttaagatttcagtatatgaactttaggggtcacaagtattcagtctatagcaggaggaatagccaagaaggatgaatgaaaatcatacaaggatgatttcatggaaggcaagggagtacaatgtctcaaataaaccaagtcctgagtcaaacattactgagaatgtgagtgtaataaaaccgagactcaaaagtaggcattggatgtgatgacatgactatcactggttaccttagggagagaagttttggcggagttgacaagcacagtcagatggaatgtgctggcggatggcaaagatggggaaatgaagatacccagtgtagacagcttctgaaagcagctggccgtgagtcagaggtagacaggaaagtgactaatacagtgcagaggtcgacgtttttagctttattgtatttaagagagagacctgagcacatttaaaatgctgatgtgacattgtccaagctgagaggaaacaattagatctatatgagagaaaagaatgatgaatatcaggcaagtatggcaaagaccaccattacttttgcaccaacccaataagaaagttggaggatcttcacaaaacaaaggtggttttggcctgagtggggaggaggaacagcttctttactaccagtggaaagaaggagaggctggtgcaggggcagggaggtagcagggagcagagggaggccccatccacgctcaggttcttagaatgaggaagatgacattggcaggaccataggtgagcatcttctaacccaaggaagatttagaactaagtataggctgggcgcggtggctcacgcctgtaatcccagggcttcgagaggccgaggcgggtggatcacctgaggtcaggagttagagaccagcctgatcaacatggcaaaaacccatctctactaaaaatacaaaaattagccaggtgtgttggcgcctgtctgtagtcccagctactcaggaggctgaggcaggagaatcgcttgaacccaggaggtggaggttgcagtgagctgagatcacgccattgcactccagcctgggcaacaaagtcagattccatctcaaaaaaaaaaaaaaaaaaaaaaggaaactaagtatagaagtatggaatagaactatattctttctattaagatatttgtgctttgaaataagctatgtttacacacttgtaatgtttaagaatctgtggcctttcagagtcatatatgaacttttccttctaatataaaatgtttaacggagcaattgactttgacatcagattctaagttgaaatcttactgtatttaaataagatttggaacctgtaaaagaatttaagccttgccgtctttagaagtttaatgaattagatttataacaattacttaaatatctgagaaggtttgttagacaattgaagtacttaaaaaggaattaaaatatattaagcctataaatgcagtttacaatgtttagagcaatttaattaaaaacatttgtaaatgagacgaaacatttctcaaaggtactcttaaatgtgattgttaaaatttgctagacctataaataaataataagattcgtaagctgaatttcaaagcttatggaggaacttgggtccatatgaatttgttactttaataaattgaatgttaattttgaaaaacaaagaaacctttcatcaatatttttggcgcctaagagctgctcttgagggcatctaattaatagtttttttattatttaaaaaatatcattaggccaggtgcagtggctctctcctgtaatctcagcactttgggaggccgaggtgggtggatagcttgagcccaggagtttgaggccagcctgggcaacatggagaaaccttatctctactaaaaaaaaaaccacacaaaaattagctggatgtggtggcacaccgctacttaggagactgagatgggaggatcacctgagcccaggaggtggagggtgcagtgagccgagatcgcgcccctaccctccagcctggaagacacagtgagaccctgtctcaaacaaaatttttttaatggctataatgaaaaaaaaaaatcaaccagtatgtaaggaaaaagctgaagccctttgccccatttcccagaggtaaccatcattacaagttccttgtgtttctgcccagaaatgttatttgcataagcatagaatctctccccagccccatttttaaacaaagagatatattctgcatctaacattctgtactgcttttgtgcttaacaagataacttgagccgggtgtggtggttcatgcctgtaatcctcaagctttgggagctgagacaagaggattccttgaggccagaagttcaagatcagcctgggcaacatagtgagacccgatctgcaaaaaaacatgtaaaattagctgagcatggtggtgtacacctgtagtcccagctatttaggaggatgaagcaggaggatcacttgagcccaggaattcaaggctatagtgaaccatgatcacgccctgcactcctgcctgggcaacagagggagaccctgcctcaaaacaaacaaacaaacaaaaaacaatatatcttaaaaacatgttcatgtttcccataagaataaagattaacatccctctctcccttcctcatcgcctttggggtgtggcctcatgcctcccctctgggttgtgcccaaacttctctcaagagtggatcctctcactgtctctacttcctgcctccccagctactgactgtaccaagactgtgctttctgagggcaccaatgccctccaccttaccaaacccgctagaggcttctcagttctcatatctcttactctccggctttcaacacgtgagccatcttttccttgctgcattgcaaagccacctttatctagcaatgaattcccatttgtatctgggtctatttctggcctttccattctcttccattgatctctctgtccttgggtgcaagttttctgatgacctgacttgattcatggataaaacctatactcttgcagaatgaatgtccttcactcaatcctccataaataacaattctttcaatagagcttttctctctttcttaataagagatagggacagcagaggttcacgtatttcctggcaaggcccagaatgccgttattcttgattgagggcagagttatcagccaggcagatagtggaattgatatccctgtgtgaaaatggaagagccaatctgagctgtcgccccattcctacagaactagctgcccgtctttgaattcccagtgctcattcaggcctctgcactttcacttgagcacatctggcccccactttctcctttcctcctctcttctactaaatagtaaaagagctcttcttcacatctcagctcaggtgtccccttgcccaggaaacctttcctgaggctcctccctatgccccacattagccactctgggcttccctctgccccagcccttaacacaacagaatcaacatgcctgtaacagaattgccctatgccccctctcccctagaccaccgtgagctccccaagggcaggacctgtctctcagcagacttttactcttgttaccgaactgatcttgggtctgcccacccggcacagtgcagccaaacactgatattgggattgcagccagagaaagtgaggcatttattgcagggcgccaagcaagcagaattgggcagctcatgcttaagatcagaactccctgatggcttacaggtaagggtttttaaaggtagagggggagaggttacaggcaaaatcataaattaatacatggagactatgtgttggtttggcctaaaaaggcaaagcatcttgaagcggaagtttgggagtgtggcaagtgaaaggtggattcaaagatttttcagtgttgtgatgggttaaggaggtgaagttttgtctaaaattttggtgtaggcagaaaagaacgttagctcttgcccgtgggcatgatctcttccaggtccctcagcaagaaacttaggagaaagcatggtggttggagttcggtcctcagcttccccttatccaaggtctctgtgcctgcagatggcactttccatttggtggaggtctgggtttctgaaacacaactcagggacgtaggttgagatgttatctttagtttctacaggaaaccaaatatcctatgactctaatttccttggctattgtcttaagctactattaccttcttgcttgtcaagttgcgcatttacttttcaaggcttgctacgtgcctggaatttctagattttcctttatttccatgcttggggagaggagtgcctggcaggctcctaagaggggtctgtgctccatctcgccccctatcttgaactatcggttgggtgctctagaatctgtatggggtggaagtgttcattcattttctgtacaaaagcaatcaatgcttattgtggaaaacccaaataagagagttgctctaaacaacaccctccccagtcccaataccttgtccagaagaaaccactgtttggtgagtatattagtcaatgtctgcagaccagatcggatgaccaagttttccataaatggatggccatccacttcccttcaagggcgagggtagtttgttctgatccatctcccttttcacagctcagggagggaggaagacccaggaaggagagctgccacagttactagtggcccagctgggatttaaagtccgccgtgactgaagcttggctccacatgccagtctgcaaggccctgagtgccctcagcagtaattccaagcaaagcagggaagcagcgggccaggtgctgaactgaactgctgctcagggctcctgagcctccccctgcctcctccctctcttctccaccctggggcctctctctctgtccctacttcctcctttagatcctctttcccctgaacccactcatttatcaccttttgatgagttccaccaggcagaccatgtcaggaaatttcttggtgttcattttaataaaacttaattattaagacagcctcacaagtcatgatacatttactggttcatttttcacatctccgtcagaggcctcctggcagccacgtgggaggcatgaaggctatggggtggaagtgtcagagccttttctggcctcctgcaggagctgggtttggggaagcagttcctgacccttcctctgccggcccacccccgttattctccagacgctgaggatgggatggaatgagcaccaaacatggagtcaggagacctgggactcaatcctcctcctgctgcagactatgctcagaccctgctgaaggaaggcatcctctctgggcctcagctgtctcatgtacaagatgggaatcatctcagtccaaaccagacagagccactgtgagattcagaagaaagctctcgcaatgagaggcctccccaggcagatggaggcaaaactgcaagggtggattgacgctggggcggcgcctgccccacagtcctgtaggtccgcccgcctgggtaagggatggggtgaaattgggggtctctgatgatcacagtaataactgactttttaaaaaattttatttttccataggttattggtgtacaggtggtgtttggttacatgagtaagttctttagtggtgatttgtgagattttggtgcacccatcacccaagcagtatacactgcactccatttgcaatcttttatccctcgcccccctcccaccctcccccccaagtccccaaagtccattgtatcagttttatgcctttgcgtcctcatagcttagctcccacacatcagtgagaacatacgacgtttggttttccattcctgagttacttcacttagaataatagtctccaatctcatccaggtcactacaaatgctgataattcattcctttttatagctgagtagtattccattgtatctacatataccacagtttctttatccactcgttgattgatggacatttgggtcggttccacgattttgcaattgcgaattgtgctgctataaacatgtgtgtgcaagtatctttttcatataaagacttcttttcctctgggtagatacccagtagtgggattgctggatcaaatggtagttctacctctagtactttaaggaatctccacactgttttccatcgtggctgttctagctgacattccaacgagcagtgtagaagtgttccctgttcactgcatccacacctacatctactgttttttgattttttattatggccattcttacaggagtgaggtggtgtcgcattgtggttttgatttgcatttcccttatcattagtgatgttgagcattttttcatatgtttcttagccatttgtatatctttttctgagaattgtttataattgacatttattaagtgctttgcagacgctgtgccaaggatgtcatgttgtcatatgtattagctggctaaatctcacagttgctgtacttgttactaatattgtaaaatgtgtaccagtgttatgcccattttatagttgagaaaactgaggcatagggaggcaaaagcaacgtgcccgaagttacaaagccagtcaatggtggaaccagaattagaactctggccaactccagagtctaccttcttaccaataaagtcatcacccctgagaaatcagggaggggccaggagtttttaataatcaaagcaacctcacaccgaagtctaagggaaagcagaggttcggctgagcaccagggcccctggcagctcagcatgggggccgtcagtgacacctgcactcatgatatcccacacctgtggtcttccaaggggacagactgaactcttgccacttcatccacaaagcccccctctatttcctcctttccctcgactgcacttccttgataacagacccaattttgttcagcaattcacccccagggaagctgacccacaaatcccatgatgccaacagggtcccagtatctttgccagttctctgacccagcctcacaccagggtgtggcatgagcaacgagacagggtagtgttggtgcaggtgacacagggctaggatatggcacaggaatttagaaaataattagactgcgttgggcgtcaggacacaccactccaaaatatgactgtaggcgaccaggaatctgccacagcaaaatctactttggcatttttcaagctagttattatgagaaactgcagacacaggagtagctctgaaaagctgtccttttgtaaaagaaatttacatctataaaggaaatccacattagtaaaacaatctgtatcaggaagagggctgctcagagacagcttctattacccgagaggctttttatctttataacgagacaacctttacttatcatacatttcctccccttaccctccaagaactccaccatctccgagaaacccaaagcacccctattcctttctgtagctcaggatgctacattagcttcaatcatctggccctactttgagtctcatgtattgtgggaacccccgccccccatacctatgcaagtaattataaatgtttttgcttctgctaatctgtcttatgtaaatttaatttatagctcagtcaaagaacctagaagtgtgggggttaaccaccgttccctcccctgcaagaggattggtctatgagagaagtcagcttccatttatcgagcacctagtaagcaccaggccccagaccttaagctttacatgtgttatttctgattcccatagactcctctagcttcagtggtattacttgcattttgctgatgaataaacggaggttcagagagggtaagtgacttgtccaaggtcacacaaccaggaaacagcaatgctgcgagtggaacccaggtgttgtgtccgtgggtctgtggtctcgctgacttcaagaatgaagccaccagaccttcacggggagtgtgacagccctcaaaggtggcaaggacccaaagagtgagcagcagcaagattttttgtgaagagcaacagaacaaaccccccaccgcgtagaaggggaccccactgggttgccgccgctggtcagggtagccagcttttatttccttatttgtccctgcccatgtcctgctgattggtccattttacagagtgccaattggtccattttacaaagtgctgattggtccactttacagagtgctgattggtctattttacaaacctctagctagctacagagtgctgattggtgcattttgacagagcactgattggtacatttcacaaacctctagctagctacagagtgctgattggtgcattttacaatccccttgtaagacagaaaagttcttcaagtccccacccgacccagaagtccagctggcttcacctctcagtgtgaccaacctccaagcttttttatttcattgcttggcttccctctctaccatgtccatttctgcacatttatttcagcctcacattgaccagctcctgcgtgccaggcatggcctaagtgttattcgaacaaagcttcggaagctagtccacttgcttctgtctagaagaggagggcggtgctgggaggaacctccctgactcctgctgcagacccactgagaggtgactcccacacggctgtcctggaacaagacagcagcttttcttaggttgttctaagttaagggctctcactgctggtaagacagggaaatagaggagataaaaataacaaaacaaaaggagaagtcacaaagttacaggaaatctcaatatatctttctgttctggatgctgctccaaacacaactgcagcagggcctctttgtggggggttcttatttgagagccacaaaggacctcaaagccaaaacagactgattatctagcccacctccatgtcctcccctccttccccctacttccttactaacagacccaattttgttcaggaatccaccccctgccgagaagaaactgatcctattcccagctcagagccaaatcctgaatcatccaatattacccccttgtcaggagtaggttgaggggtgacaagtggcccatgctttttctggggtcagggagaagaaatgattattagaacaattttggtttaaactttttttttttttttgaaacagggtctcactctgtcacccaggctggaatgcagtggtgcgatctcagctcactgcagcctcaacctctgcagcctcaagtgattctcccacctcagcctcctgactagctgtgactacaggcctgtgccaccatgcctcgctaatttttgtattttttgtagagacagtgttttgccatgttgcccaggatggtctttcacttctgagctcaagcaatccatcagccttggcctcccaaagtgctgggattacaggcatgagctactgcacccagcctaaacttgtttctaattagcagttccaaatttttagatgctcatatctctgactaattacaataacagatgatgaaatatcgaagtgttgaactgtcctctcaattccagccggaacaaacagattctgttttctctacattttgactgaactgtcttggtgtcatacattagatggtaaacttctcctctgttccaatctcccccttcttcatggctaattagttaaaagcacactgttgataaacacaatatgaatagaaaaatttttgtttagccttaaaaaatagcagtatgacaatttgtcttgaattttgacctttcagtggtggcttgtatcaaagttacggtcttgggatagtgctatgacccgctgaaatggctgcgggcctgaaattttgatcgtaaggcaaattttggtacagaaaatcgcctgtttctgctgacttctgctttagacatccactcttaaggaaaagcattgttatcccaccagctaacacatcactctctaccatatatcaaagagtctcaagatccttctattcatgaaaaatgaaaatattctcaccacatcctcgcagtaatgttcaacataaattaccaagcacagagacagtttgggaatgtacattataaatggccttccctacaagactaagagtgaatcctaatgtaaactatagactttgggtggtaataatgtgttaatgtcggttgacagattgtaataaatgcaccgctgtaatgtggaatgttgaagtgagggaagctgtaagtgtatggagacagataaatgggaattctctgtactttctgctcaattttactgtgaacctaagactgctcaaaaaagtagaagtaagtaaatacataagtcagtaaataaatggccttttcttgggctgagaaatgaagacatttcctatatgttacttggacctgtaaattcactctggggagatatatatatatatcagaaagtatatgttacttggacctgtaaattcactctggggatgtgtgtgtatatatatatacacatatatattacatatatatatatacacatatatattagaaagtaaatatttcttgttaaaatctgagatataactgccctctaaaggtgtttatttcctgggttggcttttttgttttgttttgttttgtttatttgtttttgaggcagagtctcgttctgtagcccaggctggagtgcggtggcacagtctccactcactgcaacctccacctcctgggtcccagttcaagcaattctcctgcctcagcctcccaagtagctgggattacaggcacatgccaccatgctcagctaatttttgtattttttagtagagacacagtttcaccgtgtgggccaggctggtcttgaactcctgaccttgtgatctgcctgcctcggcctcccaaagtgctgggattagaggtgtgagtgaaagcacctggccgggttggctcttatctatttacttgatagccaggtttggagtcattagtggctgttgcttactccttgaacaaacatttttgagtgttgtgctgtacaggccactggatagatagcgatgaatcccacacagtcctgtcctcagagcccacatcttcatagatctataaattaatatttgcagtagagtatgacaaaaaaactccaatagaagtgcctccagggaagatggtaccaattgaactggttgctggggaggtgtcaggggagggttcatggcagaagcctcattgaaggatctcagaatttcatgcctcctgggaggttcagtccaagacacctacctccatctttcagtgcagagggcacatgaggggacctgccaagatgaagccagagaggcaacagtggtcaaatgatagaaggcctggggcgggaaggggcaggtaaagatttggggctttatccaaatggactttattgtagttgtattcatttgataccttttgtaagttccttgtttagttattacatgattatcataaagtttgggagcataatggttagaaagatatcacagacttaggaaaaggatgcatgttcctttaatttggctcttttaatggactgagagactatgcaacgctcatggctggaggacaagcttccccggccttccagtcccataaggacacctgctgttaatggcagtcctgatggagtgtagatccctcgggctgccatcctcacaaaggtgtgttactttctggctggcagctccagatggccctagggactctgaactcagcctgtgtccgaaggcttactgcaagactgtgcgactccaccatggtcagtttccccggggaaccatctctctaccaagcccagttttccattgcaagaacaattgccaagatgtctaagtttctatgtgagaattttggcatcttgggttccttttaaataggacacacttgtatgctctaaagaaaaaaagaaaaggtttctcatgaagcattagctttcaagattacagttcggtaggatgttcaagatgcttagggtgaataaaaatgacagacagctgaacacttcctataaatgaaacaccaatatagatctaagtttcatgcatgactctcaatgtggttaatgaaaaggaagataaaaaaaaaaaaggttggccatatttgcagggcatttgctcccaaatgtttcaatcctgttttctttagactttgaaaagggggattgcacgttatctgtcaagaaggcatcaaagcagagaaatccacaaatgtgtagtgtcagatagaattcaagccttcagaaaggactccactcctttggttactaagagaactaggggcttgtatttctaagatgtcactagctggaggcgctgagcaggtaatggtctatgttttcctagactataaaatcctgattatatggtttaataaaataagaatctcagagttctgatggaaaacaagtaaacttcaggtcttagcaggcactagcagaaagcaccagagaaaactgggggagaggttaggactcctgtcccaaagatccccctcaattatcctgccatgttatcagttccctctttacatgttaccaaacatgactactaatttctatttttttccaagactattagatgtattcaaaattcactcttcttacaaggatagagaaaagtgcctatcgatgcttaataacccaacatatatttaatagaagaattaaatcaccttctgcaaaggaccaagaaaagctccatttgatcaattcctttaagacatgaagacttctccttttctaagaatcgccatagtaaaatgcaagctcagcatgacataccccaaggaaaaatgtatctgtcccttctgcttttactacagttccataagggtaataccgagttgttttgcccacatgggggctctggaatcttggctgtgatgcattggtaggatatttgtcaccaaaactgactcagcaatcagttaaatattaaacaaagcactgattagtgttcctgattcatatttgtgctttgtttaacatttaacttccgaattttatacatctattaaacaatattcctcttgacattcgaacactatctgcacaattaataaatcaaaaacttattaaaaattgaaacaattaaaaattcccaaacttataaaccattgtttacaaaattatttaaccacactctccaacacttttaaataaaaccataagtttaatatgtcagacccttttaaatgtttcaaacacctaaaaagtcagcaaaaatgcacacaaaacgtcatactgattgaaaaatatatatgcacacttacctttacactggttacaaaggcatgaagattatgggtatatattggttttaaaaagtacttttatacttattcttatattttctctgttactttcttagagtcaatgcgatcgtttcctaggattagagtatgaagtgatacagtttctcctaagaatacaaatttctttcagaaccaaaagaaaaataatctcaggccagccagctctggggttactgattcttatttgaaactgataaagtgtctcccaacattattgcacttgagcttaaatgtggcctaagaatataaaagtccgtgccttcacattggtatccttttctgagaccagagtgtttcctaaagtgcgcttcatctcctaggagactagggattttttttttttttttttgagacaaagtctcgctctatcacccaggctagagtgcagtgttgtgatctcggctcactgcagcctctgcctcctgggttcaagagattctcatgccaccacgcctggttaattttttgtattttttgtatttgagatggggtctctccatatttcacaggctggtctcaaactcccaggatcaagtgatccacccacctcaacctcccaaactgctgggattacaggcgtgaggcactgcacccggccaagacgaggaatttaaaccctgcagtttgctgtccttacgagcacatttggccaattatccttccatgttatcagttccctctttacatgttaccaagcatgactactaatttctatttttttccaggactattagttgtattcaaaattcactctttccttcttacaaggatagagaaaagtgcctatcgatgcttaataacccaacatatatttaatagaagaaataatatcacccatatataaatctgccattaaaaataatatgaaataaaaccctatcgcatttgccatttacatcaacttttctcttcatagcttcattaggaacttacagctcttcacagactccatgtgttttaattgattatagccatcaatcttatttgatattcaaaatctcagagcttgaccagaggaaacctctttaatctagcttcttagtccttccagaaccaccctgtgatattctagaaagcatccttgctttctggttacaaaagaaacttccaggcttaaaccatttgttttaccctactcaggacaacccttccaaagagcccctgtttctttaagtggagaaaactgttagagacaaagtctggccatttaggggtacaggagagttgtggtgggcattagtactactcctgctgctgctgctgctgctgctgctgtgtccactgttagtgacagaagtgggaaaatatttaagttgagttcacattagtgttcccagtttagcgtgagcattgctccattatgttgttctaatgtaaaaatgtcaaacacatttttctcaatgagatacttaacattttaacccttcatccaagctatatgttacacctcacttttctatagttgtatatttagaaaataaatatttatgaaatacttgatatttctcatcaatccttggtcactcaattgaagggtgtagaagtaaggtcaggttcaccttagtgaggggcctgcatctaaccttatctgaaggggcttatgaatttgggatttattaccttgacagaaagaaatattgagaatgaccccacccatgctttatagcaatcgctctttatagtttatttcatagtgacaagaaggaactcatccatggtgggtttttccctgagtggtctgtatggtcatatcagaactgaaatcatcccttcttgcttctgagcccccgtttccaagtcttgttctttgtttctgtaggtagtaaagtgaattctttaaatccctgccctccatcagctgctaaagcattctgcttccctctgataagattaacagaatgttggctgtggttacgggatgctttgcagtctatgtcttaaaccaagccagccatgttagcatttcctctagtggtggtgttttaggccaattgagaatgtgggtgatattaatattttccaaccagctgataacaggaaagacacttctgcttggagtccactttgagaagagatttattatttaggcagcacaggacacctccattaatcttcccccagcagtgcccatctaccatcaagttcatatactttccccagggttcaaagaagggtataattttagccagcgattagtcaatatttatcaataagaataataacagtaaaattacaatggccaatgtttgaatccctaatgtgtgccaggcacagtacggggccttttgcagctattatatcataaaacccttacaacagccccatgaaatttgcaccatgatttgcttcattttacttttggggaaaccacggatcaagtaactgaagtgatttctctaggactcacagatgagcggtggcagagcctggaattagatatatctgatgttagtgttttgaggaatcactctccccaaaagccatagctcccagacattcttatgtaatttgtctttgctgaggcttgggtattgatgatttaaaagtccccagagaccagatttcatctggtatgctgtgggagtcaagtaacgtccaaggccaagcctgtctgagagaggtttttattagctccaaaattataataacttccacagccttcttccaccaattctgccttccactgaaacagcgctggtgatgtttagaggtatgagtttgggacaattatcaggagaagcattttggtgctattgtcccaccccttctgtcctgagaggttttatctggtctttcagtatttcaaataggtcatgactagattccatgcatccctagaaaacatagcctaaattttaaattaaagtatgaggtggaagaaacagcctttcttcccttttgtttccaaggacagatggagtcaaaagtggaactggggcccgcagagccggatagcttgggcagtacgtgtgtgcacctgcaggctgtggagacaggtatttccatggagctcactcgccctgcctctcatccaggcctgaaaatcataggtaactatgaggcaagaggaacccagggtggtgggaacaccctagggtgatcccaggctggggacctttggactaaaaagatgaaagccaacattccctccccaggaggagatgcaactcctgcactctctagtgaccatcactgggatattgcacagatctgcagtcaccttctaaatccccttaaagtggacctagccatcctctccattttaagaccacatctcctgtctgctacagcccctctcgcttctttttctttaaggatatctggctggttgtattgggttaacatgcaagaagagagtaccaatcactccataacttgggtaatgcatgtcaatggtgatctgtgtggggccgcaaggttccagatggttgggacaactctacaatcagtcacatttgggttggttaaatcccccactcatctttacagctgtatcctgcaagttagtggctgcctgtctctgaacttcaccttccttatggttgtcaaaaatacctccatgggataaaaacgcagcatctgtagattcccaaataggtgcaagtagattcccaaataggtgcaaataggttcattcgttggttcattctgcagtcagggagctttcagtctactggcatgcaagacgcaatgataatgagaatacttcacaatgagtgtgacgtgatgactgatgaatgtgacaaaggagaagtaggatgcacttagacagcctgggggaattgagttgtggccagaagggagagagagtgtccattctccacctcatcactttgctgccaagagaaacaggaatttcttagacaagttctcaggtccctcggtgagactggcagcctaaaaaaggcaccagggagcagggggcactcacatcatgccatccccccacagagcatcccgctggccatctgcatcagcccgacccccacaggatagaagactggcacatccaagttgctccttccacaccctctccccactgaggcctcgtctcctccgccctgtggccaattgaaggtgaactcctaacgtgcattctgcctgggatcccagaggttgtggcagccagatgagtcacctcacaaatacagcacgtgttcctcgggggcggcggtgggaggaaacacgtgaagagctctctctgtgataatagaccatttagagcttcagatggcgaaaacaagctgatcaggtgcaggccctccaggaggctggcaggtgactcccagccagcacgccctccatcgcacgttggggaagctggaaagagcctggtggctgccgggcctccctctggcatcctctctccctccaaggctgtgtgctccccaccttgtctctccttttttcattccattgctctgttctgtttctgtctacccattcgtcttttcttcctcttctctttctgttgccattctctttctcttctcctctcaacatgtccttctctctacccgtttccccctccccttctctctctcctccctctttccctctccctctcttcctttcccaaatctctcttagccaggctccttttcgccctttgcctctcaaaccctcctccacctttccaccctctctctgcgttctgcttctcccttcttccttccgtgtctctggctcacttatctgccctctccacatcttcttccatttgccaccctccctctctgtagccacacccagtgggctcagagctgggtctttcttttttttgttttttcttttttctttttttttttttttgagatggagtttcactcttgttgcccaggctggagtgcagtggcgcaatctccactcactgcaatctctgcctcctagtttcaagcaattctcttgcctcagcctcctgagtagctgcgattacagtcatgcgccaccacgcccggctaattttgtatttttagtagagacgggatttctccatgttggtcaggctagtctcaagctcccgacctcaggtgatctgcctgcctcggcctctcaaagtgccaggattataggtgtaagccaccgcacccagccagatctaggtctttcatccccctacacaaccctggcctggcctgggcctctggtcttgggcctggaagggagtcccatcctccctccctcagctggatttcttaaggataaaacctttgctccttccttcaccacacctctccacatcccaaactcaagcccacagagcccagctctgggcccagggtgtggacggggagggtggctggtggcccagagctgagccctgtgagtcaacagcatgcctagactcacacacagacacatggcccaccttcagggtcatgaggattcataaaccctattctgcgaagtgcctccaggaatcatcaagggagctagggcagctctgagtctccaccaggcccaccctccgcctctcagggctgagcttcacttcccttcccaaaggggccagggagaggggctgctgatgacatgatctcagaggaaggccaaggcctccaggctgcctctgggcctggcacaggaaggaggaggagaaaatagggagcccaaggaaagatcaacccagcccagcccaaggacccccagccccagccccagccccagctgggctcaaactaattgaaaacagactggaaaaggctgcttttgcccttcctctagactcagcatcatcaagactggagggacagagcatttgaatcatcagacgctgggccagacgtcaccccacgcgttttctcattttatcgtcctaagaagcccagaaggtgcgtaaaatggcctgtcccaaacagatgaggacattacctttctcctcttcctcctcctccttcttcttcttcttctttttgcttcatttttctttcattttttcccccagatgttgcatttcagagaggctgagcgtgttgactaaggtcacacagctacaaacatcagggacctgcgaaaaagctctgttccctggtgacaggtgttctgtgatcctaacacagccggaggtggggacaacgtccttgcagtaacaaaggccctgttgctcaactcagtggacatcaggccctgttttcattcattagcaggtcagggattccagtgtcacctgtgccatgtattccagctgatctacctgcaagcctctactccccattttcccagcagcagccgcagacaccacccaactggcagaaatttcaaacaaggggttctgccttgcactccggtgcaagggttgggcacgtggactcacatgtgaccaatcacattgtctttcctgagatcctgcattttgaccagaggaatcaagaacaaaaagtggtggcaactgatttatccttaagaaatccaagtaatgagttcctgctgccaagatttctgggatttccctggctcctgccagtttctggatttggttcttaagcattttctgggtgtgtgagccccatacccttctcatagcttcttcagccagagtcagtttctggtttttgcaatcaaaaataacccaactaagatttgctatcctgcaggcaagagagggccacagcttgatagtcaaggttagccattgtctgggccctgcctgccccagccagctttctttcctccccagcctgtacctgccaccctgagcacaccacactggtacacgcctgtgtacttgtcttttatggtctcactataatttatttaatccctcattaatgaacatttctaagttgaagtataattcatgtattagtcagggttctccagagaaacagaaccaacaggatgtgtgtgtatatatattatacacattattatatattacacacatgcacacacacagacatatctatatatctagagagagaaagagatttcctttaaggaattggcctacatgattgtaggggctggcaaattcaaaatcggcagggcaagtagtcaagggaaattcaaaattggcagggcaagaagcctagggaaaagttgcaggcagaattgtttcttcctgggagagacctcagtctttttccctgaaggccttcagctgactcaatgaagtttacccatattatggagagtaatccactttcttcaaagactcctgctttaaatgttaatttctttgaaaaaattgccttcacagcaacatctagactggtgtttgaccaaacaactgggtactatggcctaggcaagttgacacgcaaaattaaccgacacaattcacataccgtagcataaaatgaacccttctaaagtgcacaattccatgtttttagcatgttcacaaggtcatcatcatcacgatatagtcacggaacttttttttttttttttttaagacagggtctggctgtgtcacccaggctggagtgcagtgaagtgatctcaactcactataacctccacctcctcagttcaagcaatcctcccacctcagcccctcgagtagctggaaccacaggcgcatgccaccaaatccagctaatttttgtattttttgtagagacaggggccatgttacccaggctggtctcgaactcctgggctcaaggtatccacctaccctggcctcccaaagtgctgggattacaggcatgaaccactgcgcacggcccagtcacagtacatttttcttgccccagaaaaaaaaccctgactcctcccagctcctggcaaccaataaacacattggtctgcatgttgttcatgctggttcaccttcctccttgcctccctttgactgcctcataaatttccactcattcctcaagagttagcccttctgaaatatcttccttgatcccacctactagaagcaccctgtcccacctcaaactgagtcaatcactttattttctgtgaacccccaatataagctgatggtgcctcctggaatagcctttagcaaaagatattaaaattgcctaatcaacttgcttctctttctcaccaaaccagcagttcttaaattatgatttcagggcttcttgacacttaccccatatttttaccatttgatgtgcttgtgtttccgggaagagagttcagggtttcatcagatcttcaaaaggatcccaggaagggccaagagccttgagattagggcttctcgaagggcagaggcatgcttcatgagttcccttgtgtccttatgcctggtgcagatgaggtctgctggatgagcctgggtgatgaatgagtagtcacatgtaggaaaagtgtccttccttcaagggttttccatcatcactctctatgaagcagtgaaaaagcaaaacaaagtaacatacggttaagcatcagaggaggaggatagacacataattacatattcatttgttcatctgctcatccattcacaatttagtgtatgcatctacaaggtacaaagcccagtgctcccagcagcgggtgttcagagctccgagaagcaagcaggcaccacatgttggtctcagaaggtagagagagactgtaaagtaaaccaaggaaggctccctgggggagaggccgcatgacatgagcgaagccaagagcaaggactgggactcagccagatggaacagagcccggggaagggtgtcttgagtgtgtgtgctggggggagcatccacgtgagcaaatgccaggcctgcagaggacccagagaagggagagaatttacacacccacagtccctgaagcctggagaggactttttaagattcccggtgacggtgcagagaagctgagccggggcctgactacagtgaggtgtggggtgtaattaccaagccagagtgcagagctgagccaagcaggtaagagtactgaccccgagcccactcgggctctgagcagaaggaagatttcattagtgttagagaggaaggatgtgccttctcccccggaggccagagggcaggagaccagccaggcggggaggctgacccaatggccccggaatggtgatggagcagcctgggaggctgcaggcactgaaggaagaggtaggggacgatgactccatctgtcacctcggcacttaccccaaaagatggaggactgctggcagaaacagacagaaatttcccttgagaaggagaaagccatgctataggcaatcaagatttgcacattgtcagcagagaaggaatgagactgtctggttgccgctagactttggccagggctgtcctgcaggtaagggcctcgtgcaggaggcccctgggcaagggccggcccttctcctctccctcagtgtcctggaaaggccccagggctgccccaacccctgacctctctccttctttctccatattgctagacccccttctcttggtcccctgcctcctcccactggtgtgcacccacaccttcagacagttctgagcagaccacgcaaaatacaactgtgatgttatttgcagcaggcattctggacccagaactgtgcttggtcttgaagttgaaaggtagcaatcactcatactcctctcccatgaacaatttgagaaaaaatggaggctcagggcagaagttaccccctttacaactgacgggagctatcctggggaatgaagcctgaggctaaaacctatgccctatttccagcctcatgaagtaaacttagccactgggtccctagcaaagaaactggagaactgagggtctcccccaggtctgccctccaactgccccaagccccacatgcctgcaggcggccctgggatatctgccatgtgcagggaataatgagcctggcagctgcaagaaggagatgagctccagggtttgagggttaaggacattcaccagtctcccagcacactcatctccaccccaccccagtgaatgagactgagagggctcaaggtgggggcaacaggttctctccattaccttccagccaatacctgcatgtacattgagatactcagtaagccatgagaagcgctgtgtgaccatgactgagttgtttaaactctctgttcatgctcctcccctgcaaagtgaaggcattcaaaatcatctgtattcatggtgaacctactttgttctaaggcctctgggacatccaaagttggataggccatgtccctgacccagctgactgctctcacccttgctttcactgtgtgaaattctcccacattgacgggctgggggtagggcaactacaattgagaagcacaagggagccccccgtggtgatgaaacagttggtatcttgactgtggtgtttacacaaatctatgtgtgtgataaaatgacacagaactacacacatacacacacccataagagtgcatataaaactggttagatccaagcaaggtgtgtggaccatgccaatgtcagttttttgactttgacattgtcctgtggttccctaagatgttaccactgggggaaactgggtgaagggtgcaagggcctctcagtattattatgggaattttctgtgagtctataatcctttcaaaagaaaaggttattaaaaaatctcacatgacttctcactactctgcttataaaatccacactcctcacggagcaccacaggcccgctgtaatctggcctctgtctcctctccaacctctccccaagctccctaggcccagccccatccccttctctctgcaccttgagcacacccagcccactctgtgaggctgtaggccttgctgtttcttttacctcaagttctctcgccccaaatcctaaacacaagtaacttctgtcattcaaatttcacaatcagtctccttttcttgtaaggccttctttctcaggctgatcccttcagccctaatacagttggcccttccactgtgtttagggtgctacatcaccatcacctcttggtttttggctaagatcaagtgtagagtcctgctatcatcagacatgatctgattcgtttgtttgcttacctatcactgtcagtccggacctcccctccctctgagaatgaagcagagaaaatgttatcttggtcaccagtgtatcctggaaactgcaacaggggcaggcacaggcaggagtgcagtgaatatcaatggtagatgaatgaatgaatgaatgaagaatgaatgaagaatgaatgaatgaatgcaccacacaaagtagcattctagcagaagtgaaaacaaggttacctagtgcagactttcccagccaggactcatactatttttaaacacatacacctgcttcggtgatgtactgaaggcctcaggctactctccccgcccacatctcccacccctctaacaggattcaaatctccagtgctcatatttcctcctcatcacttacctagcaaatctggctcacagtataatatcagtcatttatacttcagtctgaattccaggtcagtgccaacttcctccagatatttgtggtttaagcttcatgtgatattacgtcatcttaagggcatttagtaaaggggaagaaggaacatttttggacagaggccttttcctgtgctcatttgtgcctcacaggaagccaagagtaaatgtgcatctagacctacaggggaggtcttggcagttacagcaaactcagggaattttaaatatgccggaaactttccagagccctgagttgcagtcccagctctgtcactgtctctctgtgctttgctaaacagacttcgcccctccgtgggccgtctgtgaaaatagggcccagctcgatggcatataaaggccctctgacttccagtagtaaaactctagaggagcccttgttttctggggagactctttctgagttttcataataatgttgagtagttctcttttcttgctcacgccgacttttctccagttctcggacaccagttctgggtacccaacaattcaatccagttctgacactaactatccagagttagcagaggccccacaggttaaaggcctcgtcccacaaaactgcccccacttcagacaccagtggccagtctcagaccccctgtacttctgaccaaccagctataagtcaaggattcctaagactccttcctcaggtctaataatttgctaaagaagctcacagaactcaggaacacactttacttatgtttactggtttgttttcaaggatgcaactcagaaacagccaaatgaaatgactgaatcaggcaagatatggggttgggggatgaggcatcgagtttctatgccctctccaggcatgcctttctcccagcacttggacgcgttctccaacagggaagctctccaaatcttggtgcttaggggtttttatggaggttcaattacataagcatgattgatcaaattattggccaatggtgactgactcaatctccagcctcttccttctctccagaagttggggatggggctgaaagtctcaagcttccagtcaaggcttggtctttttggtgaccagcccaatcctgaagctatcaaaggctcaccaagagtcacctcactggaacaaaagatgctcctataccctcatcactcgggaaactccaagggttttaggggctttgtgctaggaatgggagacagagaccaaatatctatctatttatttatttatttatttattttttgagacggagtctcactctgtcacccaggctggagtgcagtggcacaacatctgcctcccaggttcaagtgattctcctgcctcagcctcccaagtagctgggactacaggtgcccaccaccatgcctggctaatttttgtatttttagtagagacggggtttcaccatgctggccaggatggtattgattccctgacctcatgatccaaccaccttgacctcccaaagtgctgggattacaggcgtaagccacctcccccggcccctttctatgacaccacagatgggcacagtcagaatcagagcctgaggtgcaggtcaaatcccttagccctccaccagtcccgcccacttggtttctgtggtagaaagttttgtttactatctgtatctgtatcccccaccaaatgcgagctcccccatcccaccctgatgctgaactgaggacactcagggctttgtgtggctctggcagcttgcacaatgggttctcagatgaggtattccatgcccttcttcctggagtagtaagagtcaatgcttttcagttcagcagaaattcatgagatattagaaagcacttcctagatctgcgtagaagttggaataggttgcatatagaagctaggaaggttccatccctggagatctttaggaagatcccattgctctgggtgactcagtcgctcatttcaatcatgaattacaggcattatcgagttaagtcaccatggtggctggacctgctttctccaaagtccctccagctgcaggttggtgagcccatagatggggttagtgaagcattgttggtcagctcaccagggcacccttatgagagtgaagtagaccgtgactcctctgcagttggttaaggaagaggacactgaacaaagtcatgtgttaagagtggtgtttggctggcaaattctgattcatctttcaggaccctgctcaagcatctcctcttttgagaagcctggcctggccctctccccatgccccactcttccttccccaggtttaattaaatgtctcttctcagctggtgtgacctcttggttgattgcaaatagtgcatactccactctctctccacggaactgtgagctttctaagggccagaaccatacccacctcatctctcactgcctccctggtgccatcgcaggacaggtggggcagagcaggggcccggtggctgctggctaaattgttggagggactggctgggagcccatacatcacagacagcagataccccagggactggcagtgtgggaaccaggtgagaagccccagtctcaggtctgcagccttcctcagtctcctcactcagtagccttgattcccagcaaaccacatcaatttctcattgcacaccctgctcaatgctcatctgcatagtgtcctccatccagagcagccctgagctgtgggcacgaatactaatggatcatgcaaatgccagcctagggcaagagtgccctggactgtcaattagctccccccagcaccagctacagtgcccaaccccttcacttgatacaggccagcccaatgcaagaaggagcaacagaaaaagaactcggcttgaaggactgctctagtcaaggtagtgtgttgtggcagcctggaaagggatcttccatgtagagtgagggaagaagagagccagcctggcctctcaggaagaggttcccacaggcactcttgggaggaaaggtggtgctcttgggggcccaggtaataattgctacacgaatgccacggctcttggaactgctgcttcatccttttccctccacctggccatctatgtgccaggccaccagcgtacgtcctgtgttgtcctctaaaccaagaccaaagctcttcacagccactcttctctgacccagtaccaactccatcctgggagggaggatgacaggctccccgtcccctcacctcttcttcccaatactgctgtttcctcccagttctttctcttccctccactgctcccatctgctttccttccttagtggataaaagcattaaatttgaaggcagagagatcgggttcaaacccagactctacagatcactcaagctttgtggcttgggcgaattacaccatgcctctgaacttcagtttgctagtctataaaatggagaaaagagaagtacctgccacagtggcattgtgaggatcattttatgaatagctaagaatttcaggtaactcactctgatgtaccagaaagttactttgcttactgcttcaatcactgaacttaatttctactccaagttcccattcctctcagtggcagagaaccctcaatcagttcaggatgccccatccccagtgttgcctgaatgttttggggtgggcttacggagcatggagcctgaagtgggctctacctctggtgggcagccctaccattcctacagaaaggcaccccaagaggttctgcttcctgtgcattctgtggtcactgtgccattcaggtcgcagctggggcctcccaggctctaggagggtttcctggaccgcaccactgttgggtgcaggggaagattccccttctccttaccggacttgcccaggagaggtaggtcaggaacccctgcctgaaaaagacacacaagtcagtggctgtgcaatgctcctgctacacacagaggtggcaggccttagaggggaaccctaggctgtgttcactctcccaggctccactttggaaaagccagggtctgctctcagctcccacattccgccaaagtctggggtttcagtgccaaacaggccaccaaccctcgaactctgcctgaggtggaggacaagggcaaacccctcttgctcctgccctccaaccagtcacatattcttccaggcctttcatctcaaaatccaagatgtgaccattgtttccgtgccacctctgccacaggtagtgaatgccgcagctcaaatgtgcggcaggttgtgtggtcacaggaaataacagaaggagccccggttaatatctcagttgtatgtggcctcatttttgcaggccctgtcccagagtcagtcctcagcacgagggcagctgagactcttttctcccccattccttcctccttccctcttcctgggtttcttcctttttcaggctccaattgcagcagcagcaatgctgggagcggagatcctgggagcccggagccagctctgacatgttcagcgggccgtgcagggtcaggggcatgctcatcggctcatcactggcatgattactaatcatcaggcagcggcagggttactgttccctcctcccctccctgctcacttcctcagggtcttcaggctgcaggagccgaagagggaaagaccctgcgtgcaccctggcaggctgataatcacagctgcagcccccaggcactaaaaggatgggtgggagcatcatccaccactcaaagggctggggacccttgtccctcccatgtgcatccatctctcctatctctgagtccccagtgaactgctgcctccctagagaaacagtgctagaagtcagtggcaagagcagcaggaggacttggagctacatgcagagtgtgagctccggagtcagaccagctgagttcaaggccagctccaccatctattcactgtgacttcaggaaggttgcttaacctctctgtgccttagctgcctcatctataaaacaggaaacaatgagagtctttccttatggggctattgaaatgattaagtgagatcaggcatgtgatggcacacagtaagaactccataaacagaggtcaccactgctaatgcaattattctatcacctcaggagactaaagcaggggaggaaacaccattgactcctggacatttacccaaggagattatggatccatgttttgcacacactttagaaagacaaggaattctaaccacagcatctgtctccactgcccccgtcatttcagtctcacccgtccaccctcaacctcaccactgtggcccggaaatgcggttgcccagggccactctcaccccacctcagccctgctctgctcaagtctcacttccactccttccagctcccatccctttctacccagctccaccctgatttctccaccatgacctttaccctcctagtctgatctagacccctgatcttgccgagtatctaggactttggtgcctttgaccctcagcagcagaggtagagagggatctcggtgaagtctgggatgttatagtgacttgtttatctaagtgccctgagactgtgagttccctaatgcagggagcatcaacctctgcagagagccccagagccctgctcaggtgtgatgaacaggaggcactcacttgatgccctcacaaagttgtgagtgaatgaatgaatgagtgaatgaatgattgaatgaagattagtgattatgttaatgacctgcctttttcatgagccttgcaacctcccaggtaccacactaaagcacttaaatgcttccactcatttaatcctcatagcaaccctaagacataggcgtaattattgtacctattttatagatgttgaaactgaggatcagtgaagttaaaggcacacagctaagggatgaatggataaaatcctttaccataacctttcctccttaggacaaagtttcttcaccaactgtccaaggctgtgtttcactggggagagtctgaaattctacaccaagcatgagcatgtgttcatgcagcatggtaactctgggggaaaaggttcacaggttttatcagatacttacagtttgttagaacatatttgaatccatccatctaaccacccgtcccctttcaatccacccttctgtccacccccagacagccatttgatcaatattcatgaaatatctgccttgcgccaagcatagtgctggcacccatgaattccctggtctccagaaatatccttccccctctccctgactacccctgcccccgcctcaccacacacacactccttgcaggatctgggtaactgggagggctttaccgccagtgtcccagctgcgtgggtggctgcactctgtctgaactcatctcagctctggtggagactgtggcagcgcagaagcgtgcagggggaatcctcaggcagcgcagccatcaggacatgaagggcagagcctgtgccccggcttccccggcttccgctgcagtctacatcagtcctgctccctccagaacatgatcaaccgggacagatgaggccatgcttgatgcataaggatgcagccagggagagctgcctcccaaacccaagtcctattcaaaggtcttttcttcctcctggggaggtaggggagaaggtccaagcaaagggaactggaaggggaaagtgaggcatggagtttgtgttttctgaatcaggactgtgttccagccagggagaccctgtgtcaggcacttttgtaatcacgatcactttcagcctcaccctgcgacctccaacgacattgctgagattgttctccttgcaaacatgaggaaattgaggggctcaaaggtcaaataacttgcccaaagtcacaaaacaaatccgggactttaagcctgatctgcttgacctgaaactcatatctacttccctgccctctgaagatctatatgtcctatgtcatcacttcactgttcacacaaggtgatacctggcttctccaagcacctgctaccctgaacttactgcaccactctttccttcctagcctgaatgcaatttgcaatgaggagatgatttgattttcttcagccctagacctccagcttcctgagagcaggtactcttgcctcttcttgctcattattgatccatatatttagaatagcgcctggcaggtagatggtgcttaataaatattcattgaataaatgaatgaatgaatgatccaatgagccccaaagcaaataacaataaaggacatttgcagagtgctctacagagagacaagtgctttccctttactttatcttaccccattctcacaacaatcccctgacatgattgggttcatgtttcacagatgaggaggctaacggccaggtgtacataccaggggacatgggactgggttcatatgagctcaggggtaaatgatgacaccctttcccctgccctgaaggatctcagtttgagtatttgtagcacacttaggatgttctgggccaggctgagtggcggtggatgggggcggtggaggtggggtatgcaaagcaggaaactcggcctttgctttctaaaagctcccagtctatttgaggccagacttatgcatgcagaacatttgggaaatggtacaagacagcagcaagcatagtgctgaattgcacataatcaggtgccaactgcattcccttccttaactaatctgagtcttttaataccagatggggaccctgagaatagatttcctatcaaacagatgaagagcaaagatgggagccgagggaaatgctgtggcttactcatttttatacccctgtaacccagcatgatgtctggcccacagcaacaggaatagggcagtccaccttcaataatgggccactctatgtgccaggcacctgctaagggccccacaaacatcatgtcaccaatccctcacagcaacactaccacttactaaaggaattatgaaagtaatccacaagaagctgaaagcagggttcagagatcgtactcatcatgcccacagtctcagagtaaaggggcaagctcagtgtttgaacccaattctagcagcctcccaaattaatgctctcaatctgactctatgctacctctgtgcctggaaggaactactgttgtccataaggatgagaagaaacatggctaagggagcactgagtagggaggaaggaggcagcagggaggaagaaataaattaagaaagaaagagatacaaagaggaagaaaggagagggggagggagggaaagaacagggcttgtgtgttacataaactcagacaagcacatgcatgttttaacaggattcctgcaggtctgacaatctcactccttcctccctgaacaaccttagaggggttgcctaaggagtcctatatagaggcttatggcagaaggaaggccttgcgtccagaactttctgagctcatggattgacactggggttgcgcatcagtctgcttggaatgccttcaaaaaataccccagtctgggtggcttatacaacagaaatctattttctcatggttctgaaaactggaagtccaagatcaaggtgccagcagggttggtgtctggtgaggcctctcaccttgtgttgcaactgccttttccctgtgtgctcacatggtatctttgtgcgtggggggtctttggagtctctccttgtaaggacactaactctatcagatcagggccccacccttatgacctcttttaaccttcattagttccttagaggtcccttcttcaaatacagccatacaggggcttagagcttcaacacagggattttggagggacacaaacattcagtccacaccggggtgcatgagggaggggtcagagctggagaaagtgcatgagctagttcaccttccagagtaaagggagcaacagccactgaagctcaggttggatggggctggcaaggtcgctgtattgagtacatcatgggagggacaacaggacaaatggctcctgcagtcagggtgactgatgggaggcttcttcagcactccctctgcacattcattttgtcactccctctctccccatgcagttctttgctctctgttgcaagttcccaggaggcaggcagagggcctgttatcatcatctttctctcttgcccctcacacttacctgtgttcttctacttagacacattctttgtgagcatctcatgggtgatgttggctgcattgtacagtgggcacgtgcgtatgtgtgtgtatttatctgcaaataatacccatgtcacaaggcgtccgcaggaataaatgagctattgtgcatgtaaatatctggtacatggtagatacatgaatgaatgaatatttgttgaataaataagtgaatgaatgaatcttcacttggcagagcatgtgtcttcctttaaggggcaaggatgatctggtaatcatcagtttctgcttactaactgggtcactgagcaaagaaaagagactcactcattcatttattcagcataggttggctgcacccctgtcagaaaccggaggttaagcagaaagtagagagttaaatcagtatgtaaagcagttaaaacagtccagagggagagacaggcaaggaaaggaacaatgagaaacaaagtaaggagtgctctgataagaagccctgggtgctatggaaaccacaagcagggcaccgactcagggccagggagggatccctggaggagatgacatctgcagtagatattccagggtaagcagcaggtggccagaaggagaaagaggtgaggaacattccaggcaaggggaacagcacgtgcaaaggccctgaaggagaaccacaacacgcatctgagaaatagtgaggggtctgggtggctgagccacaaagggaacaccaggggtcagggaggatttgtagaagaagccacaggccacaaaaaagacctcataattcatgttcaatggtttggattttattttggtgacttcactttatacctactgttcagaggcagccaattgcaaacacgtccagaagcactttgctatttctgatctgcaaaatggagcaagtcatctgtactctgcttcttcagtgggttgtggggaagcagaaatgagaggatgacattctagccttttgtgacctctcaagtgctgtccttatggtcattcaggtaccatgaaaattagcagagccccaagggggaagtagcttggtgctcacccagtggtatccctgacaagttggcaaagacacccagggtggcttaactttctcctcagcaaagagctctcctctgttccctgaatcctggatatcccactgggtcctctagtgaccccaagcttcagcctcgcatgccctcttctcgaacagagaaggcaggagggaagcagggaccagcccctgctccatcttccaggattccaggcctccctggcctggacaagccctgagctggcagttaggagagcagaggttgtgaatctggtgggacccccagcaggtctttctggctcagtgccctcatctgtgagcaggggttccccaggagaccacgacagaggcctggaacccaagttctaatcccacatcctggctgggcaacttcaggcaaatttctaacacaaggtaagcctcaatttctctctggggtaatgatcaggcacctgcttaattcacaggggtttggtgggcatcacgtggacaatgtggttgcacagcagtgggcaatgcaaaggaaaggaagtatgttagtaagtgcccctcccctgttgcacaaaacaggacacatgctgggattgcagaaaagcaataaatgctgcacaggtgaagaaaactattcaaggaccctggccaagtcacaggctacctgtggccctgaggggacagctcatgggttggcattaggggaagcagctctcaaggggcctgtatcctggggattcaactctgtgcctatgtggcattgagcctgtgtgaatgtggtgactgtcatgctgttttgctgtgtgtgcgtctgcatgcctgtgtgtttgtgtgtctctccaccttcgtggggggcaactgtaggtgtattatgagccttgggtctgtctgtgtgtacaatagcaatgtctgtgcggacttaaggacctgcgcccatatgtttgtgggactttctgggcatgcatgcttgtttatgaggccatacatccgggtattctgtgaactgctagcatggtgtgtatctgtgtggcagacagaaaatggctgggtgggattgtagggggcagcttgggcaaaggatcctcagtgtcaatcaaaatgggtctcagtgggaacccaagcagctcagacttgggggaggggaagctcttcctccaccttccagggagcaaaccttgcaattcaacaccacaaggctttgagtccacaggcagggacgcaaactttgcccattgggtgagacgccactcacagaagggaaatggcttcctaaatctaatcattgccccttcaagcactaacaacccgtgcccaggagctgatggctaatgaattattgagctggaaagggagaagaggtagaaccaaggaggaaagaaacagaaaaatgagagagcaggccgggtggggtggctctcgcctgtaatctcagcactttgggaggccaaggcgggtggatcacctgaggtcaggagttcaagcccagccagcccaacatggcgaaaccccgtctctattaaaaaatacaaaaaaatttagctgggcctagtggtgggcgcctgtaatcccagctactccggaggctgaggcaggagaatcgcttgaatctgggaggcagaggttgcagtgagcagagatcgcaccactgcactccagcctgggcaacagagcgagactccgtctcaaaaaaaaaaaaaaaagaaaaagaaaaatgagagtgtaagggcccagaggggctgagggctcctttctcctccccaactccctgtcactagaaggtgggccctgccataggaggattctgcagaaccctcaaggacccgcggagcaggacggcaccttcttcccatgaccacccatttggatgtgtttttcacccctttctgggtggggcagactttccccctccccatgagttcaggcagtgggttaaataagatttcccttgaagtcgaatgaaatcacaatgcaccacacacagggacacacacacacacacacgcacgcacgcacatcacacacacacacacacacacacacacacacacacacacatacacacacacagtctccctggggccaatctactgccccctgaacctcacccatcagccaggtgcctggccccgggtctgtctcttagggttacatgctcccggggctcccgcacataccccggcagatgagggtgcgcaggggtgagggcgcagggctgggcgtcccccgcccccaccgtgcagccctcgcccccgccccgcccctccgtagttgcccgcccgccgccccctccgccgccccctccgccgctccgactctcgccccgagcgctggcagcaggcagcaggcagcaggcgggcgcgctgtggctccgcgccgcgcggtccgggctctgttcattcatgattggtactcggccctccgagacccagcccgagcgcagggaggggagccgagtgtgcggcaggaggggcgggcggacggcggctcccgcaccgcacgcggcgctggctcggcagcctcggccgggcggccgctctggccccgtgtccagtgccaggcaggcttcagggcaccgtcctcggccctgggcgagggaaccgccgggccgggtcctcgcgcggggaagcggttccgaaggctcgcggggagcggctagccctgagtccctgcatgtgcggggctgaagaaggaagccagaagcctcctagcctcgcctccacgcttgctgaataccaagctgcaggcgagctgccgggcgcttttctctcctccaattcagagtagacaaaccacggggatttctttccagggtaggggaggggccgggcccggggtcccaactcgcactcaagtcttcgctgccatgggggccgtcatgggcaccttctcatctctgcaaaccaaacaaaggcgaccctcgaaaggtaagccaccttcttccttttgttcccctgtctgggcttgggggtgctaggcgccgaggtgggctgtgccacctgcctcccttagtccggactctcctctccacgaggagcccggacaggtgcttgtatccaaaggagagagaaatcggcgggagggctggtgtgaacacccagaggagggagccggagtggacgtctgccccagcggcaactggacccctctggggcaccaggtgtcgggactctcctcctggggaaatctctgagagccgaaggaagcggcatgttcacaggtgggggtgaccggattctctggtggaagtgtggtgaagctcttcccattcccatgacagctggcgtttgagcactcagtgagggtgctgccacactcccacactcctcctaggcggctatgccaggtgcagacctgcgagtcccttcatcaggaagagtgctctgtctgcacccccaaaacctctgcaagccaaaaggaatcagctgctgccaggggtaaaactcccaggcctcatgtcctggtggctccgggagtcaggaggagcaaccgtgaagggctggctgcgagctgagcttacatcaaggattaaaaagcataatatcgtggagtctcttctgcctggacgctgttccttcaccacctgtccccagccgaggcatggctgatctcaccatccgtgggagagtcctcaaatgggtccaggtgaagttggaaccagtgtgttgggccctggaggacaatgcaggtctccttaccagcagttcaaaagttagtggttggaataaagagactggaagcagttaggaaacgggaaatgatgggttttgttttgtttaatgttcaaatgtcactacgagtggtaagattttaagcagcttgacacttaaacattcaaattctaccatcagagcccccatcctggatacaggtgggagttaagctcctaccctacaggcctgatagtgagtagaagtgtaatggggtaagggaccccaagtgaacaataagtctcctcttagaacttggttggtctcaccctgtttagaaccacagagatctccataagtaagctgtccttgaaaccccctggaagaaggggtcccagcttctggcccagctcccaggggcatcaggctggctgagccccgaggaaagagatctctgggtgcagatcttaggtgctgaagctgggttggcatttacatcctagaacataggaagaggctttggcccatttgtccagctgagttacatgtcctgctggcaaggaagggactggttgtcctgttaccagtcctgaccagaacaggtctgcaaagctcagcccaaggccttgacattctaagcctcacctctcacagatcctgggatgctgcttgactggggacaattttcagcgccaaatataggtcttctccctcatcatctgtctgaccaccatgcggtctcagaggccaggggactgtggggacaggaaagtcaggggcttgtttttaaatattttcaatgcctgtggctctcctgggagctgggtgtcacagaaagatctcaagccctagagtcaagtggagtctgggtgtgaatcccagctccatcactccctgcctctgggaccttaggaaagtcccccgcacctccctaagcctcagtttttcatccatgaaattcgtatgctacttcccggagggaagggtatgtaggaagtagaggaagggaagactctgcctcatatactgtgttggctgcagccaccagggacccagaggaagttgttgtaaggatgtgagaatcaaatgaatgatgaatagggagctccgtgcatagggctgggaaaagagtaagagctcagacattgctgtctaccatttccttctcctgccccaaacatccaggaattcaccctggatgaattcctgcaggattcccagagtacaaaggtctttgcttctgtctcctcggattctaagaaacagaagagggggtactggcattcagtgtgtccctactgtgtgcttgccataatgctcggtgttttatcaacaactctcatttaaccctcacaacaatgttcgtttgaggctcatagcaggttcggggccaatgggtggactcccaagacaagctatcgaagcactgggcactcagcccttcctgcacaaagcccactggcgtgagttgtccaggggtccagctgcatatgttcccccaggtatttgcccccgaagcacagtcatctcactgccttgcatagtggaatgctaatcagcagaagacccttctatgggaggcagcttggaaacctggaggaagccctggctgaggaggctagtggtcagggagcctatcctggccaggtcacttttccccactggggcctcggtttcttctttgtaaagggagaaacttacattaggcatttcctcaggttccatttggttctcaaattctaatatttttatggttgatgctctcaccagagctgctgctatgatctcagagacgtgaggctcagatctaattagaagcaaccggaagagagcagttgggatttttcaactcaggaatcagtctccctgctgggttcaaattcaggctctgccacttactagctgtatgactaagccttgttttcctcaactataaaacagagatagtagtagttaccatcttaaaatagctgttgtgttgtgtggatttcaaggatcatgcaagtcaagcatttagcacagtctctgctacataagtggtcagcaaatttgaggtactattcaatttatggctctattgtttggggcttccaaatgtccagagtaaggccattttcgaagtaggcagtacatctgagagccttaacagctcatttctggaaaccttatccagccctatccagataactaggaccaaaaaccccagcacacagatgctcgtcccttgcttcaaccctcactgacctctactctgtggcttgtcctgaaaacatcaaagcctgctcaattaaaatcctgaatgccttgataatacaatttagaaacatacatagtttttaaatagggcaaaaactctgcatgattagtgctgcaagaagatatccagcccaacctgggtgttcagggagcgctctctaaaggcaacagaaatctaaagtaatttaagagccatgccactgaataaaaatattcaggttcatttcctgtccttctctctgtttgggatctttgtgtgtctttaattaaaagtaggagagccctgcttttgggattcagcctctgcatcccagtcccagatagaatttctgactctagcagttttgcatgtgcatgacacaccaaggacactgctcctggccttgaatgggtaagtgagacaggctagggcattgaggagaaccagaggaggaccatacaggtgcagctgctgggcttgtcagcggggcaggagaatttagggacaacatcactagaccaaggccatctcaacagagaattgcctagaagcaaataatcccacactacaggggtggctgggttagaaatcctccatgaccgagtgcaagcatgcagaactttctgaaagggctgagcttcggatctccagaatagtcatagcataggtgagctatgactcaaccccatggctatcagatgctttttctaaggccacacggtgagttaatagggtactggttaatatagggccaaacatgggaatgttcccgatagtcccatatttgctcctagatcaatgagcacctcagggaacttatggaagcagagtgtacctgatgagactgggtttagggtttattggtcagggcagcattttcaacctaaagatatgggagagtgacaagagacagacaggcatagagaagcagtagccgtgttgtcacatagtcctgagcccaaggggcaggcctttggcaagtcatttcaccttgtaaatgctagtttctttatctgcaaaaggagaatcctgatgtatagaaatgtttgtgctttggtctttacccatctttgcatctttgcctgtccctttaattctataatgctctcccaccccaccccttgctgccttgtctaatagttaaaattccaccgacattccaagacctcactcagcaatttccatattcaggaagccttctccaagccccagagagaagtgatttctcccatctgaattcccatattcttttaaggtgtacattttcttatgactcacaatcgcgcttggaattagacaatcaacggaggtgttaaccccctttccccaccaccagaggtcagggttcttgggggtaggagctcgtctaactcatccttcacaactctctgcttggttctgtgcacatagtaggtacttaataaaaattttcctagagtaaactataaataatggaatggttggccactctccattatttgctagaattgcagaccctgcaggaaaagttagcttcccaccggaatttcagttaccagccctctgccaggaatgaattctgttgttcggtctgctggctttgaattgactttgtccatgaaatgtaccgaatctgtttaccatttagcaggaaagtgctgagaacagtgattctactcccactccctcataatcacaaaggtatgaggaacccacacccagcaccaggcacagttctggtccctcaatcccagaagaagctcaatggagctcaagataaacagaaagagagagatggaaaagaatggaagacagaggagaaggacttactgcctaaaatcagtgggattgttttgacttggtctctggaaaagggccaaggcttagacctctttgtctgcctggaagggccttgctccatgaatgctttgtaaatctgtaagtgaataagtgagcatatgctttaacaaataagtgaaaagatgaatgattgaatgaatgggggaagcagtaaaggagtgaatgaatgaagcaacaaatgaattatcaactgaatgacagaaagaatgatcgaataaatgaccacatgaatgaatgaatatgtccataaatgaatgaatgatgaagtgccagaacagctataattaacagcctatcttttcacaaagagcattgatagtcatctccccaaagttgaaaaatataaattcagtcaagaagagtcctggtaattttttggatactggtaggtgtatagtgtctttggagaaggtgaggagatgtctctaagttttcactcttttgctgaaacaaaagcagggactgactcacagtgattccccttgtcttcccttatatttcaggttcgttcacccttgcctgggtgagatcagaatctgtatatttatccactcatttatttgttcacttagccagtcccacaattgtccttcagcattgcttccctgcctaagatccactctggcttcctcatcctccctcttcctccatctcctcattcacctggccaactcctacttatctttcaaggcctcattcaatgccaccgctctgggaagcctttcctggcttctgtaggcagagcacatctctgccttctctctttccccatagctgctgctgcttcccttaactacaattctgaacacactatgaggttgtcattatgggtttacacatttatctctctgactagctttcaggcactgagtcttatcccagggcctctgtcaggcctgacactgcatccaggcttgatggatgctggcggcatggaggtaaggatggatgggccagagtgtgcgttcttgatggctctgagcggtgtgagaatgcggcggtgcagatgaggaatccaggtctgctcctggggagaagctctgcaaaattctgcataatggccgtggagctgatgttcccattcatcaggcagggaaggaacagtttttagaaaagagagagagagcctaagagtcctagggccttcagagaaacatctctttaaatgcttccccttcctccgggtagtattttaaataggtcaccttctggaagtagtggtagtcagttgggatattgctagcttcccgtaccccagccatgggagtagtactttggattaaatcttgttattcaaggccagactaaaagcctcattggtgcggtggggggaagtaggaaccacattccactcaaatcaggaagctagaagtaggattgcattatggctatgagcaccgcgttaaaataagagtcttgggattgaactccctttcattggttcatagctgagcctttccaggcctcagtttcctcttctataaaatggggacagtgggccaggtatggtggctcacatctgtaatcccagcagtttggaaggtcaaggtggacagatcacgaggtcaggagttcaagaccagcctggccaatatggtgaaaccccatctctactaaaaatacaaaaattagccgggcatggtggcatgctcctgtaatcccagtcactcaggaggctgaggcaggagaatcgcttgaaccgaggagacggaggttgcagtgagccaagactgcaccattgcactccagcctggatgacagagcgagactccgtctcaaaaaaaataaaaattaaaaaatggggacaatgacagtgtctccctatagggccacgtgagggccaagaaggaattgaacatggtgctgcacaccaggtgagttggcagtgctggctttgctgctgccttttgtcccatctcaggacaggccccttccttctgccttgctccacttggatgatgacggtgttacccttggtaatctccccatccctttgagctgtggcctctgattccagccctctgagatcccgagccaccatatccatggtcactggcattctaagcagtttctctggtgattcctaagggaagctgtcaactttagatggtaaaagcaattcccaacagtgaggtatgaaaatgcaggtcacccgccaggaaggataataatactagctcaaatgactctggcctccacccagtgccaggcaccttgctcggctctttcctgtgttattttattaaccccaaccctggaggacaagatgctattacagttctcattttgcagttgaggaacctgaggctctaaaaagggaagtgccttactaagggtcatagagcttgggaatcgcagagcctggttctggttgatcccagaccctgagcttctaactgccatactaacctcctctcctcctggctttgcctctggaaccttagggacctgagtagaaaaacagtcaaaacgggtgcatggatgttggggagaaggcattcaaggatagactgaagcacctcattagccacacggaacaactgagctacgtgcaggccctgagcaaaatgcttttagccccatcccaaccccgcctccccctagatctgtttccatttcatctgacactgtggaagcctgaatatgaaatgattgggggcagaaggccaattagcaaattcattaataggattaaacatctctcctctgctctaatcatttatgtgaactaaaattttctctctttgttatagccatcattgcctgtcagtgaagatagagtgtttaaatatcttccaagtatgttagaattgcaaacgttcagaaccagggaccaggatcagagttttcacacggtccaggtgggcaaggagatcagtcggtttacaagtggttatcactgctaagaaaaaaacacaagaacttgctagtacatttgcaagtaccttactgctcatctcctttctctccttagccacatgttggcccaaatcacctgcgtatgttatacggttgttatgagcatacactcctggttaggcagacctagaattcaaatcctggctctgcaactcattagctgtgtgacattgagcaggttacctcgcttctgtgaactttcatctctacataatctagaaaatgaaagtattgttgataattccctcccaggttgttatgaggattaaatgcagtcatgcatgtaagatgcagcggtcagcactcagaatgcgctaaaggtaaattgttactatctgggtctactccacttaaagtgtgctcctccaaccaacagcctcagcatcagttgggagcttgttagaaatacagagtcccggccaggcgcggtggctcacgcctgtaatcccagcactttgggaggccgaggctggcggatcatgaggtcaggagatagagaccatcccggctaacacggtgaaaccccgtctctactaaaaatacaaaaaaattagccaggcgtggtggcgggcgcgtgtagtcccagctactcgggaggttgaggcaggagaatggcgtgaacccaggaggtggagcttgcagtgagccgagatcgcgccactgcactccagcctgggcgacagagcgagactccatcttggaaaaaaaaaaaaaacctcaactcagtgagacctacccagtcagaacctgcattttaacaagatcaccagatggtttatatgcccactggagtctgaggaatactggcctaaagtacagattatggaactatgtgtattgtattacacaaaattatatatcaagccagaagaggcttttgctaagacttctgatttaagcctcattttacaaataagaaaatagaatccagagaaggtgagtggtttgcccacaatcacacagctcaagtgttaggcctgacatccgaaccccagccctggtcatctcatataaattgttaagaagtcagatttccagatttgcatttctgcaatcaagcttgtctgtttttctttctctctctttctttttaacaacaaagaagtgcaggatgatgtacgcccattaagttttagtttactcattttaaatgttattccagccaacagagatcctgaatcttgactccaccagccatcatcttagctgtacctccaagttttctgctacctgaagaaatgataaggaggcattctaggtctttatctaagttgcttctaagaacatgggccagaacagggtgcaggacagagccatgtggactgcaactagagacttgcctgcataatggatttcactgataatgttcagaatcccagagcaggatggcagcctggtttacatacagagcctttgtgtgggatttgaagccagaaaatgtgactaaagtaggagtctaaacagacacaggtagggcctggggaatgaaagtcaaatgccttttccagggggtctagtaggacctctctgttggtggggatcccccaaaaaagtaatctttttatttttgtaggagtcctgtaatggtttcattattattctcactttgcagagtaggaaacgtagatgcagggaggttcttgattggctagtgattagtaagcaaggacttgaagtggatctgattgcgaggcactccaccacctgggctcctgcctgcagctggagggcatatccaggacaagcaagcctctgagccccaggaagaggctgagcagttacagctagtttcccaactcccaggaactgaaaatgacagcctcctcttggccccatcagctcctcacccatgccaaccctggacccagagtgagggatgttctggtggagaccatgaagctcccagctgcctgggggaagctggcacatttgcatccgtgtggctgaggctgcactttctctccatctctgggattcgcccatgtatgactctcccagatgtccaaattgtgcactcagcaggggtgtcttcaggaggcttccccacccatcgaaatcagggcagcaaggggctccccttgtcttcttccctctttgcatacatccagccctgggctgattaggactctaagccctgtaggccctgacactaaaataatcaggtcctcccaccactgccccgccctgcctcaccccaccaagggctacacaggcatttcaaaggagaaacagtaaaataagtttaaggaagtctgccaaatttggatttttcccatgttgactactttagtgacttttctgaaataaaatgtgctttcaaaacacaatttttgatgcctctactttgctagtgctttaagcatctcttgagtgtgcctgtgaggtatttcagcattggagttggaaccagacaggaaaaggaaagaaaccgatctgtatcgggcacctgctgcatgccaaggactgtgcaaggtgttgacaaaataacaacagtaacaaacataacatttaaatcgtccttgtgacatttatatagcaatctgtgccaagtaccactctaagcgctttcggtacattaagctaatttaatcctcacaacaaccctatgtggtaggtagtgtgattattcccatgtaacagatgaaatctcacactatgagagacaggcactgatccccctattttatagatgaggaaactgaggcttgggaagaagtgacttgcccaagtgccccgatgcctggtggaagaacagtgttcacaccagctttggccacttccaaagcccttgatgttgacactccaaatgcaggcctcactcatttcctagaagcgccttatgatttgatatgtcctcagggtgcattataagaggagggaggaaaacctgggactacaatgagcattgaatcttgtcctgatcttctcagggaccctctgtcattcccgattgcctattgcatctgttctcacctggtactaccattccctcctccctggtttttcccttgctaagtgaccactctatacgttggtccatatcatgtagcctctgctggaggcaagtctggttcccatctgccttcccctgaagaagaagctgctggaaaattagagttatgttggacacagtctttgtccccaaggaacttctctctggtcataatcattatattaacagcaaacctatagcatgctatgtgctagacactttagcaacttggttttatgtaagccttacagtatccccaggaagtgagcactattactagaccctttccagatgaggacactgaagactagagggcataagcaaatgtccaatgtctcacttctcataagtggaaaagccaggattcgaacccagatggtttgcctccagtgcctgcatgctgaatcactggactaggctggacctgagcatttagaggacattatagattatgtaacactgtggggattcagaggatggagaaagcacctctatctgaggggcaggggctggagaattagagaagatggccgaaagaggcggcattagagctcaacaaaagagctaggggttggcccaggcaagaatgtaggttagtgaagttctaggcagaaggaacaggataagcaaagtcacagaggcaggcaacaagaaggggaaagaaatgaaaactgacagtgatgttttgtatgcttgtgacttggaggatgttaacagaaagaggatgccatcagaagtgggaggcaaggagcagagtcaggctgtccatgttcaggagaatgggacaaggtcctaggaggtagtagacagcaaggatgaggaaagcaccaagcaagtagggatcgagactgtgccctctcagcaccacccttgtccccctaagtgtctccccgtgatcactgcagcttacatttgattcctccttctcctctcccagggaacttactatttgtccccatgatttagcctttgattaccttgaactgttctatcatcattccctgtaaacacgcttgactctccagcaagagtgacctttcctcagagacctggacctttctttcttcccttctcagcatcttcgagcatcccaggacagtactgggcaaaagactggtacttggtgacttgaactgatatttcacagagatgcacaaagacttgggattccttaattagaattcatgcggcagagaaacttgggcatgactttgaggatctcccccacccgccaacagcatattcacaagatacgaacatcaaagattgtggcttggtgtgaaaacatagcacattggaggccattccataacagcttagagctgatgaagagaaaaagatatggtgtgttgggtgaaatagaactgaaggccagtcctagcttaccgtttaggagctgtgtggtttgaagaaattgtttagcccctttctgcatatcagcttcttcatctgttaaacaataacaatcatggtatcaattcattggattgtcatgaggattagtgagataatatgaatgtgtttagtaagctataaggcagtgcatacgtggtggggatcagtattagatgacaataatggtcatagcaataataatgattttgatagtggtggtgatgatgtttgtgatggtggtgtgatggtggtgatggggatggtgttattcgtggtggtaattattatattatggatgtgtgagtctgttttcacactgctgtaaagaactacctgagactgggtaatttatgaagaaaagaggcttaactgactcacagttctacaggctttccaggaggcatggctggggaggcctcaggaaacttacaactgtggcagaaggctaaaggggaagcaggcatattttcacatagtggtaggacagagagagagcaaaggggggtgtgctacatacttttaaacaaccagatttcatgagaactccctcactatcacaagaacagcttgggggaaactgcccccatgatctggtcacctcccaccttgtccctcccccaacattattaactacagttcaacatgggatttgggtgaggacatagaggcaaaccatatcaagggataatattgttgatgatggcagaggtgttggtgacagtaatgacagtaggggcttcatggcaataatgatgatgatgatggaggattacaatattagtggtaatggtgattattatagtataggtgatgttgattataagggtggtggtggtggtgacaatggtgatggtggtagtgatggtgatgatgatgataatagtaatgatggtgatatggtagtatgacagcgatggtggtatggtggtggtggtgatgatagtgacggtggtgatgatggtgatggtgatggtagtagtgatggtggtgattatggaggtggtgatggtgataatggtaatgatggtagtgatggtggtggtggtagtgatgatggtgaagtgatagtgatggtggtggttatggaggtggtgatggtgataatggtaatgatggtagtgatggtggtggtggtagtgatgatggtgaagtgatagtgatggtagtggttatggaggcggtgatggtgataatggtaatgatggtagtgacggtggtggtggtagtgatgatggtgaagtgatagtgatggtggtggttatggaggtggtggtgacgatagtgatggtggtgatgataatagtaatgatggtggtgtggtcataatgatagtgatggtggtggtgtggtggtagtgatagttgtgatgaaaggtggtgatggtggcagtggtgatgatagcagtagggctgatggtggtgacagtggtgattatatagtgatgtaagtagtagtgttgttggaaggatgatagtggtagtggtgtcaacagcactggtgaatttaaggcaatcattccctttgtccaaactatcttctttgactaggctgcacagaaggatttccaacccccagaacttgaattcccccaggtgtatttgtcaaaagtaggaaagaataagacaaatcagcccatgccttcagatttcttctcttattcctggttggtactttcagaatcattttaatgtaagctgctttcttgacatttgcattccagcacgtggcacagtgccatggctggtacatcgtcaagtcttcaataaatatttgtgaaatgaagggatgaacttgcagaaagacacaggctgttctcttggatgaactcatcagagttaaatgtttcatctttgaagataacgcgggggttatcaggcacatcagaatatacctgcattaacactattgccagcatgagcaattcgataacctggcaggttgggaagatttcttggcacctacactgcccctggaagcccccggatgtcagcttggcctggcccttgtacccaccactttgccctcagaggtagggtctgttctactgggattctgtgctaactgatcacagggaacagtggggaaaatggcctctcccaccggctgcttctggagagtccaagcctccctcctcagtgaccttgctgtgcggcaggaatgagaggcacatcctggctctggagatgttcttcttggcagcaagtcctccccaatggcaggagggattacagaagtgatttcaggtgccagtgcctccacagcccacccaccctctgctctaggcaagtcagaggcacctgtagagcctctgttctttgtgtgtggaaaaggaataatctcgcaccagcattataaggttctcatggtttttaggggtgtggcatatagtgagggctccgctaatggcagcagctattaatattggtatcatttattatttccattactagtggagacattgagctgatatatgggtcaataatgatagactagagactttgtgtgtctctttggtggaacatgtgtggcttggattcaccttgaatcccctgattctggcactctggcctgagagtgtcctctgaatgagtcatgtggtgccagcggggttgttgagatagatagatggcctgcaggcatttgggttcaaatgctgttctgctgaataaggaatacgatttggggaccaaacacccttggatttaaatcccagacttgtttttccctggtggtgtggccctagggaagtatttctgctgagccttactgtcttcttgtgtccagtaaggttagtaatattgaccacattggctctttgggaagaggatggaaaataaagtgtaaatggagcgagggagggaatttgtctccgaggcagcacaggacaggaggtaatggaaagaccaaagtggtttttggattagagctgcctgcagcctttatctgtctatggagttgatttattattctcccaaatcttggaacaaagtcaagaaagggaggaaggaagggagagagatgggtaataagagtatggaagaaaatgtaaacatgtagagtgcagacagcggctgcctgcccatagcaagccctccgcagagggagaattaattggctgttgtcatttgtattgttgtgattgttcttattgttgaaagatgtagaagagaaatcaggtagaaagaattcaagcaaagacagggggtgagcgaaagcatgaagaaatgaacagaatctgggctgaatttctttaaggttataaagcactctatgcaatctgaggcaggcagtccccaagcttctagtaccaccctgcgactctacgtgtcaaacaggaggagttccttaaagggtgtttggtgtgtgcatgtgtgtagagggatgaagcatgtatacctctttgtatacatcagacactgtgctgggcactgcccttaaattatctcacttaattgtcacacagtcctatgaagcagatgctgttattgtctcagttttagagacaagaaaactgaagctcagagaaaagaagtgatgaccagcccaaggtcacatagctgctaagtgcagggacagcatcagaacccaggcccgtctgtgcccttaggtctcagagattctacacctactacctagtattagctcaatctgacccttggggaaattaagccccaggaaagctgtttccttcagttgcgcagccaacttgaagcaatggtagactgaatcccagttctgactgccagctccacagtccctccctggggcctcgcacatcattggaactgacaacacaagaatcttccatctccttccttctcttcctccttttcttggctgtcatccaaaactttaggggaatgcattataaaccaacttgagagacagagaaaggctgtaggaagatccaactcaaaaacattttggtgtttgctttacctccgcctgagcgtccctggagataaaccctcctcactctcgcccaccattgctctgctatgtcaatttcagcagccggactctggggctgacatgcattgccccttctcaacccagacaccacttccttcagggaaggctccacataatggtgaagtgcacagactcagaagccgggcagtgctgttcagaacctggttctgcctttctcgggcgtgtggccttggataagtcatctactctctatgagcctcagatccttcgtctgcaaaacagagctaatgcctcccttcttgggttgctgtggggcttaattgagaaggtatatgtgaaatgcctgctccataatagacacccgtttgagaattaacgtttgggttgttacagtgtgagcccatgggtctcaggcaacagacttgataaatacaggttcctctgcaaccacaatcctagtccttagcacaagcatgacactgcctggcatgtgctatccctcccatatccatcagccatggcagacacagatccctcattatgagacttttttattctgagctagaatgtgacctcagaatctttcttaacacaatgcttcaagcagtcactaccagttgaacatagttgacatggaagatagatgaagtttatttgcattctagttctcaccaagtccatgttcactgctccatctgctcagtgcaggctgtctctctgctctgtctcccacctgcttttgtgagtgtatgtttctatgtttgtgtatatgtgtgtttaaactcctcttccagagtgaaagaccatttcagtcttttgtgtgctgatttgtagaaatcattgaactttcagaatcccatttgcaatgtcatgtctgtggctggggatctccaagtaacatcagcttacgtctgggaaggacaaggggaatcaaagttagaagtcaggagagcaaaatccacacacagcatgcaccatcggccacctttaggagtgacacaagagatggtgtttgaatataaatttgaagtctttccaaagatttaacactcctttggctgacaaccataatctcaaggaggtaggcctaggctagagcaattatactttagggtaaccctagctgctataacaaataaaccccaatattgcagtaggctgaaacatagaattgtttttatcattcatataacttcttgatgggccagtagccttcttccatgtagtcactcagggacctagcctccttccatcttgttgctcccccaaccctaaggcatcctctacatctaggtgaaaggggagcagaaaatgtggtctctggcccaggaacaactctagtcttggagaagcacatgatatagtatggagatcacagccaggcctgccaccggcagcaattcagggctgggcaccagatcagctgggtggagtcccagctggccaaggagtctgagcccaggtactatgtggtcatcttgggcatggaacagggcagctcaaggaccagaggtcagctggcagggtccgcaccaagcctatccagggaagccctgccctgatcatggacaaggcctgtgtaatcctgatgtcagctgcttccctcccgaggacagcctgcagcagatggtcagagcctgttgccattaaacatttgagtggttccaccagcatcccgatgagtctgggttcaccaagaaacattattgtaatgtgctccccaggcagctctgcctcagggagagacaatgccaggcatgacaacttcagcattcttgttctgcatggcagttgcatttctcattgtggtttatatgttggtcacatgatctgagctaatgggagtattcgcctgacagatgagtcccttttgctgggtgtgccagcaaaatcaggcttccaagcccccaaggctcactgccagaggctggggaattcgccaaggtaaatgccaccttgtgaggtctttgggacacagccagcagcctccccagggcaccattcctgtctcagcatgaggcttctctggccagcccaatggcatttgggagccacatccacaccccacgggtctgggtctgtttccagctgcactgggacattctggcagattctccctgatctctgtaaggaagagtacagcaggaaggagaggaagcagaaaaaaattccaatgcttagagttttccctctaaagaggacctcctgagccacttctgaacaggacttggaacaaaggaatcttggcgctttgatgatcgtgtctgcagcagttgttgaaatgagtctgacactcgccagtgccttagtaggaattataattacatcaggagaccccaggcaaccaagtaaactgattagctactgctccgagttgatagatttttttctctctaggtcataaatagggctgtgggagatggtggaagcatgctggtgggaacaggtcgagatgggctgtacattcaggaagcccaaccaagtggtgtgggcagctccccctgccccaccctgccaccggaagagacagtctgacaggtgcccaaggtagagttcagttccctcggccagggactgcactcctgatcttgcgtgctgcagagagctgtcctcagagcaggctgagggtggctgaactgctaggcgatgctctgggaagccctccgccaggaaagccgatgctttctgccaggcataattattgcatggataattacacgattcagagcctgctggagaatcctgggctggtgccagagtagaaaggcagggttccggaactgcagccagtggctgattctcagagtcgactttgaaagaagagggtaatcattcctcctcctaagactcctacctggctgggccaggacatggcaaacgtaaagctaagggaggcggggagttgatgagttctctcctccacccactcccttacaggagggggtccccagagttctgacctaatccctcttctttactccctgcacgtgtcacctccctgggacaatccacccctgcccattagcacatatatgcggatgacaccaagtgtctttccagccaggcatctgcaaatgcatgctgggcatctccctcacgtgtctcctccagcccattgcactccagcctgagccattctcctcctaccccagtctgcctctcagtccatattctcttcccagccagacatacctaacctcccagacctccactaggaacccaggagtcctaacctgctagtcctttcccactccctgtgcaccatccgaagccaggtcatgtcagttctacagcagatgtgtcttggctcctgcctgttctcccagcaccaccccccagtcctccggcacagcccaggtctgggctccatggtctgccctggctttcttgtggtggcctcctccctggcctccccaccctcatcccctggggaccagcctcccactgcctccagatccaatgtcttccagtaaatctgtctacacattcccaaggttggagtccttccatggtttccttcactctcagcaccaacttggccccttctgactgtcctgaagacccttcccaagctgccaacgctccagcactgcatcccctgccctgcttgtgacacccaaccctatcagatgccacatgcacttctcccagttgtccaatgtggctttgccaagcctgagcatacatgtgtggaagggaggaatgcaagggtgaatgttctggactctggagctacactgtgtgggtttcaatcttagctctgtcacttgctagctgtgtgacccaggacaagtcacttggcccctctgttattctttcttcccatctataatgtagaaataatagtaataacagaacccatccatggggttgttgggaggattcaatgacatattcatgtaaaagactcagagcatgaccagtgcacagtggccatcttatcaagtgcctgctgcctgtcccaagatggaaacacaaaatgtgaaatccaagtgtgggtggtggaggggtggtatggggcggggcgggaattcagtttaaactagttcatgccttcattttacagagggagaaacaggtcctgagagaggagggaccttacccatggccaccccaggacccagcccagtgttcttggttctgaggcccggctgccctggcatggagcagacagctccctctgggtggtcaagttccctgagttctttgagggctgactagtggtgagagggattcctccccaccaaacccctgactctgagaagtgggttggagcaggagaagaaaagtgtgcaactcagctcagctttccagggtaaaccgatgagaggacatttgacggtggcagcgttaggaggggacttctgcacaaggccggggaaactttgcctaagatttaggccctgggctcagcctgatgcaccccatttactgggtgcctgctctgagaccaggatacgtggaaagaacccacgcctgggagccagctgtcctgggctttggaaatagctgtgtccgtaggtgagaccttgtctctgcaggcctctagcagaggggctaagagcatgcgctctgcaggctgcctgggtcctcacccctactcccgcacttagtagcccttggtgacttaaccttcctgagcctcagttttctcttctgtaaatggaagatcataatgatacctgccccatagagttgtgtggataagcgatagaatctgcattaaagcatttaggtagtgcctgagatttagcaaaggctcaatcaacatttaaaaatggcaagaaccaagcactatcatgcaggtagggcacccatctttgtgcataatccctttgccttccctccctagaatgcagaggaaggaagacctctgtgagaaccctacatacatctttgccaattggcagtttttcctctagttaatttgggagcctgtgacctttaccgccgtgtgattctctgactcagactgcagtgttgcagtgccagccaaacatggtgacaagccccttcccaggcaactgaggacaggcaggagtgttctggaatcttctcctggagtgggagtaagggtgggcagagccatgtgatgctgcactgtccacctggttgaaggaagtaattccagactctgtctctgacatctctattagccaagggtgagggtgttagttcgggtcatgttagctgcgcctcccaccctgcatcctgggcccagaaaccacacccctgtgcagggcttctgtgtcagagtcaccagggaaatgggctgctgaggatgccagcaccaaccaggctgctgtcctggggcgacatgtctgccatcttacaacctcccttccaatattcaccatgtgccagctccagctcagtcactgagcctcacatcgctggaccccactgtgtgctcagggtcatcaggcactttcgcctgtggctgggattgagacctggctcctccaccttgcacttgtgtgacctggccatgctcatgtcaccctcctgggcaccccaataccctcatttgtaaagttcaacctacatgctgtgactgtgaagtgagaaagcagtcagcagtgcttagaacagtgcctggctcctactacacactcaataatgccagctatgttgtcaatatcaactctacgcagtagcccatttctgtagatgaagaaagggaggctacaggaagggaaggcatgtgcctggggtggattcgaactcaggcctgtcgggttccagtctgggcttttctgctctttccaggccatattggaactgccattagagggactcattcattcccatacatgtcaaatatgcactgcacccagattacatccatctttaattgaagacctatccttctgggctttggagatttgctggacttggggagtcaccaatacaactcaggtagtgacatctgggaggagaagactgaggtgtcatcagctgcttcttatccccctgcctttgctcagcctgtccccactgatgggacacctttgcccaacctctcacccataccttttatctgattagctttttttttttttttttttttgagacagaatcgcgctctgttgcccaggctggaatgcagtggcgcgatctcagctcagggcaacctccacctaccaggttccagtgattctcctgcctcagcctcccaagtagctgggattacaggtgcctgccaccacacccggctaatttttgtatttttagtagacatgggctttcaccatgttggccaggctggtcttgaattcctgacctcaggtgatctgcccacttctgcctcccaaagttctgggattacaggtgtgagccaccgcacccggcctgattagttgcttcttcctgtcctttgggacctggtacaggcatcaccttctctgggatgcttcccttgtccctccctcatcacaaggctggcttgggtgacctttctccatgctccaaaactcccttgctcctaagcagccccagcatggagctccaagccatgaagctctaatatcagagtccaagccttatagagcttccagggtctgacacatggcagaagttaaattaaactatgtatttgtttatttgctaacattctgccttattacaaaagagacttgagtcaactaagcaaataaatgtttgcagagctgaattaaactgagacagggtactggcccagtagaaaagtagaaaatacctgggcttgggcatcaggaagacctgggtgagaattctccagacctgtgccttctatggaacattaaaaaggtcactttccctctcaaagcctcagttagctcttcagggcctgcgaacggcaatctattgtgaggacctggtgtgtgagccaagtgcacccatcagccactcacagctgcagcagaaccaggcagttgagtttgacattggccttttaagctagtcacgaataatcagaagacccatggcaggctgtcactagtgattttgcttaggtacaaacttgaatggtgctccttggagttctgatgtgggagagtcactgagctggacgttagcacacacagttacacgctcacaggctcaccccagcatgcatgtctcaaaacaatatattttcctctatttgtccttgggttttcagttacagcaaaagtattttcaaaacaaaacaaaatgcatcatgatacaatctcatatcaagtaacattcatttggggggacgcacttaaattaatagtttcataagcggttgttgtcctgcatttacagacacacgacaattctgaaggggtcatgttatttttcgattatcctttactgcattttatgtgggacatggcatgctgcagtggtgtttgtgagctggaggatttgggagagccttaggaaccctcccaggagcctcaaggattgactgcagtaggagctcaaatgagttttgcctggggcctgccctggaggagacctgcctctcagcagccaatcccacccaggctgctctggaactggaggctctggctcactgggccctgctccccacccacttccctctcgcctctcccattcccttccccagtctgcagcccctttgttcaaggagggagctgcaagcgggtggtctctgggcagctggataactacttctaaagcctcttagaccctggtaatcttcctcctaacaccatcgggtgactgcaaagcactgcaggccagacttcagttctgctgtgtaatttgcaagctgggtgaccttccttatctatagaatgggctctcctgcatggctggcatgaggaataaacaaaatggttgtgtccagtgcctggggcatagcacagctcaaaaaacttagttcatcctcctgagggatcaagaagatacttggaaacaaatgtccaagggcgtaatcttgaaggggcttgtgccaggcatatatggagagaagggttttgtgggatgtcagacttaatagtgccctttactccccacccccgtctctctgttcatagacaggaaatctgtggcctattctgggacctcaaagtgccacagggttaaagataccaagtcagaaatctaaggttctaaatggactttagaccatttttcatttgggaaggaagaattctttaaggggttgtgctggcgctgtctctgtatgcatgtgcagaatgtgcttccagatggggtaatggtctgagtttgaggacagaagtccactccactgcattcaactgttcaatagtcctgggcagtgttattgcatgggagaccatacctaaccccaaagattgccccatagtctctttgtcagataaagcataagtgagcatcccatctttgttagtcagaaccttttcagtttcaaacaacagaaaaccaactcttcctgtttaaaggaagaaaaggggggtttattggttcatgtaataaaatggccagggtaagattaacttcaggcagagctgaatacaggtgctcaaagaaaatgtcgacaagaacctgttgatttctctgtctcagctctgctctcttctgtcttggcttcattctcaggaaatgctctaaccttggggttccaagagtagtcaccagcagccccatatttacagcccaccagctcagcaacctctgtgggaaagagcttctcaatagttccaggaaaagtcccagggctggctcccattggcctagatagggttctgtgttatgctgtgaggtgctggttctggggacggaggagtgttctgccttaacaaccgaatggactgtatttgtggggaggtgtgggaaaccaaggagctcttaccaggagaatggatgttgggccagcagaaacaaaatatgttactgccttcttcaagtacacaggtttctgtaaagcctaacatcacactgaggcaccacttgccccaaactccagcctgaaggattatgaggagttcgagcttgcctttgcagggcgcctgcttcctgttaggactgtgctcattgtacatggaccttcttctgaacctctgagattggttctgttatctttattcccattttacagatagccaaccacaaacttactgggtggagtaacagtgttgcccagagttagagcttataaatggcagagttggagtttggacctatattaaacagtctaacttcacagggcagactcttagccatcaagcaatatggtcttccccgagaatgtctccccacttcacccttccaggcctttcttcttgttggactctagactttaaatgcccttctttttacttcctgctcacttattaaactcttccttgaatgctcctcctcctgatagttttccccaggattaaatctgagcaagacccttttctacaagaccaaggtcaccatgccactgctgactacagctggtgtatttgtttgtcctaacccttggagggcagagactaaatttattgtttaccactctggcacctagtacactgcctggcacagagtaggtgctcatggctcataacatgtttattgattgtttagatggcaacacagataaaatcaaaacatggaaggttgctgagactcaaagacaggattattattgttggtaatgatctgatagctaatgagtattatattaataatagtcaacatgtcaggtactataatagaggctttgcgtaactgctccttttagtcctcccagtaatactatgatgctgatattactcttcccattttgtagataaagaaactgggagtcaaggaggtgaaatggctttcccaaagtcttgcatataatgtatccggactgcaaggatggggccctctggccccctcaacaccctatctgcctctcatacccagggacctgcccacaaggtcagccccttggcaatcttgccaaccttggggctcaaaattcagtttatggcttcccaagatctactggatgctttttctaagtttggagaattcatgacattatgaatcctttttccccaaggtgggtattcaaactcagagttccagccacgcttgcatccagggctcagatagcagagggacctgcctgaggcttgatttagaagggtccacctgaggatgtggatgaagcgtgaattcatttctggcaggggtggcagcagaggcagacagctctgtggaggcagaggtggggaaattctggtgtctccttcctagtgtggaccatcgcgcctgtgttgagcagtggagatagtggggtctttcctgcagaggcctccatggtagggctcaaacattgttctagctggggtggcctccaagcctaataccttgaccctcttcgagattctctgcactgccaaatatcttctaataaattccttctctgcataaaccaactagaatagattctgtagtttacaaccaagaatcctgactgaaaccccctgaagcttgtgggtttaggtatgaccatgtgggaaggcagcatgagctctggactataaagagaatcagttgaggatgtggcagcaaacaggtatactaggggatcaacgaggggaattattatgatgatgggcctttggaaacctctgccttctacagcagtactttgaaactcttgtgcacacagatcacctaaggatgttgttagcatgcaaattctgattcaggagtttggggctgggacctgggatcctgcatttccaatacccttctccacttaagttttgctgatgctggtagtctgaggaccaccaatgaggtggtgaggttccagggacgcttaagcctccagcaaaacatcacacaagacagaagtgcctacttcaattgcatgagataatgagaccaaatcatccccgggcaagcccaccactaacaattattcccatcattggtaacatcctaagtcctaaggtacctggagcttcaaatctcataattagcactcttgttatgccaagcctgctcctaatgaggacactttgataattcgctttgttgaagaaacaggatctgttcctttcccctacagtacagcatgataggagtgtggtttgctatttgtacctgtaactcagcccagggagtgctgacaatgggggagccactgcaggagtcccagcctccccacctcatgccccaccccctgtcctaagccccacccttcccagcaaaggaaagtaggcccctgaagcagttgtcctgtcctctagaatcctctagaatccagctacaaacatccaagtcctgcccccatcttcccgatctaactcacaccatttgtcatagtgacctggcctcagcctctttcaacttcttctctcactgccacacctttgcgtaggcagctctccagcctggaataccctcttatccatccggccaactcctccatgacctctgagatccatgtggaaggctctagaaagccttcctcaaatttcctttgttccaggatttaagctgacctaaatcctagagattagtacttcattttcaaacttttcatttgctcaaagcctacagcaaactcagtccacacacttggctatacaagaaaggttgctttctttgttgttctataactgactttaatttcaacttcaagtccccattcttgccaaggggtagaaatggaatcttggtcaacttaggttcccctccctactctctggggttgcatttccaggccaggcagtttctgctggtgcttttgttccttggtcctcagtcttctttctgtgttgacatccattgacatgtcctcgactcccctcatctcagatcacaggcccatgctgactccaggagtattcttgtattctcttcatctgaacctcaacactttttgagaccacgcatgcatgtgctctctctttctctctctctctaacacttctggaacactcttggacatgaggagatattggtctttctaggatggggtcaactggccctgcctcagatccattggcctgtacatatcttgtagccattgtggtgccatggatcacaggtcacgatgctgtgtggctgcctctgctcttagacctgccccccatgccaccagagggagtgtctgcctccccctgccctggacactcagctggaggggagggtcacagtccctcacagtcccttctccagtgacaagcaacaaactcccagtcttcctttctttctgatcctctcctcctcttcctccttctcctcttcctcctctcccagtccaaggaagttttatgcaaaggccagaggagggaataatgaggtggaggtctctctgaccaagcatgtagccttccggatctgttgtgctttccaggagtccttcaaagctctaagcttttggaattctgcaagctcaggaaattgaaaaccttttctctcacaactgcaggtctttgtctgcagttgtaaaagtctgtttagaaactcaggagacaagcagcatcttctttgttccctgctttctggaggcagtcagcgtggaacaccctgcctgcagtctgactcagggaaagggtcactgagtgtgtgtgtgtgtgttgaggggtggataataagcaaggagaacactcagacagagagctcacagaggggcaccccagcacctccctcacctctatattccccgcctgggcatagtggagggagggttaatgccagccaagtttaacaggcatttctgattcgcggcattgttgttgcgctatcctgcaatcctacgctgcgggtactgtttttatcctgatccttcagctctggaaactaatatagagagctgagtaacttgcttgaggccatgatgccaggatccacggtgcccccaggctgaagagccttaaccactgggctgtaccacctcacaggagggcaggtggcacagtgcctggaacttgggagggtccagcacgtggaactatgctctgtcatttacttactgtgtgtcactggatcagtcactcaacaccgctaagcctcattttccacctcttcaaaagggatctaataaacctgttagcagaaggctgctgtgaacactaaatgaggtggcttaggtgagagctctggtctgaagatgctcacactttgaatctcaagacttgtgtgaaccaatatcagatttctcctattagattgcaattctcagggagtcacattccgtctccaaatgcccatctcctgatccacaaaatgagcacaacatctctgataaacggtaactagatggttccagtgggcagcgggagtgggagggcggttgactgggccagaacctcaaatgtattcctgtgtagtttctcatgcattcattcagtttggcaccagaaggtgcccagactcactttgcagccagtctgtccccatagaggtgataaaggaaaaacatatgcacatttaaacttttaaaagtttatttgaacattcagcgattcacaaacggtatagcacagacagcaagcaactagcactcctctaggaggggccaaacaggatacttttataaagaggttgcagaagcaagacaaagaaaaccattttaatgggttggaatggaaagttcctaattagaggttcattggtggctcctgattggtgcagcttctagtttcaacttactgtttacattggtctgtggtttgtccccataggaacgtaaggtgtcagagccagctactcaggagaatgaggtgaaaggatcacctgagcagggtaggtggaggctgtggtaagcagtgattgcaccactgtactccaacgtgggcaacagagtgagacccttaaaaaaagaaggaagagagggagagggagaaggaggaggaggaggaggaggaggaggagaaggaggagaaggagaagaaggagaaggaggtggcagagctacagaagcacctgttgcccaggatggagtgcagtgatgtgaccacagctcactgcaaccttgatttcctgggctcaagtgattccccccacctcaacctcccaagtagctgggaccacaggcaggcaccaccatgcccagctaatttttttttattttttgtagaaatgggggtctcattatgttccccaggctggtcttgaactcctgggctcaagtgatcctcccaccagagcctctcaaagtgctgggattaccagcatgagctaccataccatgcccggcatagatttttttttttttttaacagaggctacagacaagactgactgcctggcctagagttgaggcccgggagacttgcctcctgtgtgcagcgggctgtgctggttgcctcggtttcccagagtctgatgaacatgtttcctccacaggcagtagctgcttcatttgtttttctcccagttttcatttctcattagctgctaaatcctccccatggctgcagaccctattgtagctgactcagccagtgggcacagcaggggctgggtcccagcgccgtctccgcaacctaggagaggtcaggggcagcagtgcctgcctggctctatctccaagtgtgcctcacccccactgacaggtcagattatccactgtccccagagacgttaggagggaggccgtgtcctccactcccctagctgacacactggaaggacgttctccttgacatctgacttaatgacagtggaaccaagcggggtgcccttgggtgaaggaaaaaggagggaagacttgagccttctttaatgtcaataccctgagcctgaggccacaagcaaaggccagcagcttctgcaggatagcagaagccaggagacagggaactggggagtgtacatttatttgcttctccaacaacaacaacaatatctaggtgtgcagtgagctcccacttctgctgatgtgggactagacaaaagatgagaggggaccaccctcagaggctccctcctgcttggccccaaactctttgtaaatccagcaccccacccccagttgttccccttcaggaatcatcaccctctgaaaacctgcagaaattctcaaatcccagccccctttgcttctcacacttgtagaggtctttccctaagcaaacacctgctttgattattcagggagtgagaattaatatcattgtaaatctaactcaaacataattaagaagttaaatctacttttgagggaaaaagttctgattgctcatctccagaccagataaataagatttcaaatctccaagatctgcagctcggtgtgaactgccctccgcctgtctcagccagaacatcaagtggaaaggggcctgaggaactgcctcctccagccccaccagtgtggagatgcagctcagtcttgccatctgtgaaatgggattgataatacctacatggttgtcttgagtttagctcataaccctttctccgccagaatatcaactccgtaaaggcaggattttgtttgttccccatagtatccccagtgcctcacacatggtaagcatttaataaaaacaaagccatcaatggagatgacgaaacccagagagcagcagtgccttgaccggggtcacacagcaagttagagcagagccctgattgaaaccaagggctcctgggccttaaactaggcgctccttgcattagcctgtggcaggagatgtaggtttgctgtcaatccttccaccagttactactgcctgtgcagccttgtgcatgaccttgctttccctgggcctcagttttcccagcagtagaatgggcttattattagaggagaagaccacatccactttggaaaacgggcagaaccttgtcccaccttcccccaacagctgaccattttctgcccaggctgtggccagaacctgttctctcccatcattaaaatccctctctccttctccaactctttctttctagctccaccctccccaaagaggaaacaaaggaaggcaaacatattcctgttaccagcccaggtctcagtgggccaaggtggagtgaggggagggaagaggctacagtcctcccactctgcccccacacacctgcagagacattaaggaaagcggagctaccctgggctgcctctctgtgatttaacgctctctcactcccacacctgcagtgcaccggagttaaaaatgaccttggcaaacagccttatgtattctctgtctagagcagaggacagagtcaaagaaaacccactcagaagcctggagagcggctgaaagtgggggagggcaggaaaggagggaggcaggatggaagcatgcatctcctgggcattagacttgctggattaaggagtggagagtcaaacatgggtagctctgctcagaaaaattattactgaaggagagattatgctccacaatctcaccagaatgtggctttgcaaagtgaaacgagggttcgttcctctgccagcacgaccaactctcccgggacaccccctcaggtccgtccttgtgccacaggccacctcacttcaggttggtggctcagagaggtagcagctcccatctaaatgtggcttctagaaccttctcttctcctgctgagaaaggattgtgctgagtagtagaagcagctggcagtggagtcccctggcctggttcctacaatcccaactttgacaattgtgtgacctcggacaagtcaccttacccatctaagcacatgttgttttaactgtaaaatgaggaaaatagcattcaactcagggtatgaatgagtggagccatgtggagcaacagttaagggcatggacttgggagtcaggcagccaaggtctgtgattctaggcaagtgatgtcaccactgagcctcagtttctccacctgtcatacaggcaggagtaaatgcctcctcaccccctttgttccttgtacaaacccttgccctggatgttctgtttgtcctcaggaccccctctccactgttggctggggaggctgacctgggaggactctgtgaatgaggcccctgccttccgacttcagctgttcatgacacaggcggagactgcgggcaggaggagagtgacacgaggtgtcaactcccaggctccctccctgagggttatagggcatggctctcttccatagctttctttgctcggccttttgttgatggttttcctcattcatcaaattggggtgctgagggcacccactgcttctgtcccagggcactgccctcttcgtgtgctttcccactctctccctacaccactgtacacagtccttttgttacacggccttccaattccccaatctgagggtgccattgtgtccagctgagaccctgaatgaagcaactgtcccgtctggccacagacctggcacaatttcccttcaggcacttaaagcaggagtaatgaacactgatgagttcagctcagtgctaatccctctacatgtgaaatctcagttcttcagagagccctgggaggaagctactacagcctttcccattttaaagatgagaaaactgaggctctgagaaggtttcacagccagagctaagcctagagcccttaatgactatcctcatgccctctccagtataggcaggaggctactgagtacacgtgcttgaacttccaaggcatgttctcaagtagaagtgtcctcctcacaactgctctgaggcacatgccatcggaaagctgggctaataattaaacaggggtgattttgtcagccccacatggcctgacaaagcagaaacacaatggatggtaaatattctattacgactgttattcccaaccccctttccaatggggtggtgagtaggaagcctccctatgaccagtttcttccccacagtcttgccagctcctgttcttctcatcacaccaggcttgtggccttgattttggaccctgttggaatgagggtcacaagagggtctgtctgtccacacacacagttgttcctcctccttcttccccacctccattcttacccattctcagtccttattccagactcctcccttgcaccagctgtgtccttggcctggggatgcataatgagacccagatgctgcccccaaaactctcagtttatggactgtccatcttgaagagatgaccacaggatgctcaatgctccagcaaagaggaatcctgtggttcaccaaaggcacacaggtctttggcacttagagaaatcatttgtcatatgttcctctaagtgccaaaggcctgtgtgcctgcagtcattcattaattgaaccaatattattcaatgagtccatttctggccactccttctcagctagccttctttatgagattttcctccactgacactccctgaactgctgctagccccagggctctgggctggctttctattcctccttctgggggtgtcattcattctcttggctttaaagaccatccatatgcaatctgcaggtcctatgatcatggcctccagaatctgtctcatttcgtccacatctcatcacctcctgttttctcactagcccaagccaaactcatctctagtctacactattgcagacatttcaggattgcctcattgccagcaaatttgcctcctacaagtcactattaattcatatgtcgggttgtcacttcctggttttacttcaggttttaataagcctgaagggaaacacttgttttcattccccagcatgaaactgggacatttcctctggtccttggagtgaaatccacactcccaaccacagacttcaaggccgcacctgctctgaccctgctgacctcccatctttcaccactggctgtggcttccttgcacttttgcaacaccaagctttttcctgctttcaacccccagacctgcccgtgggttgcaatttttgggcatccggatctcagcaaatgtgcctgctcctcagaaaggccttcctggccgttctgcctgaagaagcccctgtccacatcaagggtcttgcatctcatcaccctgttttattttccccatagcgctcatcccaacctaaagtatcttgtgaacgtgctgctggtctgttatccattgtcctcgctagacttcaagcccccgaagagcagggacctggcctgcctgttcaccattgtctctagcacctagaactcaggcctggtacaggataggtgctcaacaagttgttaaggacaaatgtcaagaagtacctgggggaagtgaggggctgaattggggggaataggttctttggttatggcccaaaaattgctagaagtttaaatgtgtcttctaagcccagctctctgtgttctcaaggtcgcaaatattaagaactcagggtaaataaaaatgtatcctttccagtgcctgcatgcccacactgaaatgagaaaagattttttaaataataataataaaggaacgatctttcaacctgcgtgcgggtctcagcggctccacttgcctgctgtgtggatctgaccagtgcactttcactgcctgggtctgggttcttctgatgtaaagtaaggctcccagtataagctgctttccttctagattccagggaaatcatctcacaaaactcaaatgtgagacaaacaagatttcagggcaaggaaacagactcaggagctttcctgggggcatggctccctcaaagcctacgtcctgtagagacagcagctgctaggcttcttggatagagtgcctgcccccagtgccactcctcactccaccctgcaaaagtctcaaaaggtatgttgaggcacagtaagcaggctgctagagcccagcatacttacagccctgaggttgtcagacaatgagcctcgtgatgagttattgcaccaacagctgttgcccagccctgctatgtggatcttggggacaataatttatccacaattacactggagagcatggtgcttctcaggtaacaggtggaaattcacaagcccaccatgtgatgaagacctgcccttccctgaccacaatgctatgagtaatgactgagaagattgggcagcccatcctcagtaatgcaggatgcactgtggcccatgtctgaggcatctgaaatatcagaaactccagtgggcttaccatggtcccactcctgccataatggttgccttacagtggctttttcttccaaaccaacttgccttcaactgcagaaggtgaggtccccaaaacaccagtaggccataggatagtgtgcggccggtagaataagaacctcagacacttcccacttcccctggtagagaaggtcttagtggccacaccgaaaggtaggtggaggctaacagatctaaggctgcccagtgtgccatttctgcactggatatgaaatgtgccctctctgagccctctctctgcctcagcgatctcatctatagaatgggggtatagagatagacaatctcatatgtgatcttaggcaagttcagatctcacagtttccaaacttcagtttctccagctatgaagtatgagcttgataatcttggctgtgtgactttggacaaggcccttccactctctgagccttggtttcccatctataaaatgggccaatggtaggggtgggaaaaggatgacctctgaggtcccttccatacagctgcctctgattcttcattgcaagtgacccagtgttccatatgacccatagccatctgtctgtcctttgtgccaggcctgaagcattccttttggactggtcatttctcaccgtcaccccctggagtctgccccaatcatttctcagtccttctgactgtgaagtgtctgtctgaactcataatcagcttttagctggtcccaaacagtgagtgctaccagctccattaatcccactgacagggatttatctttctcagctgaatgaatgatgctcccagccttgccccagaaatgtgggctgggctattcaacacttgtcaccagcaagctcttttcctgaggctgcatactccagccacccaggtgactgagtactttgtcatcttcttctcagagcagtggcagaaccacaaagcaaactcccacccatgacccacccacccaccttctgacctagtttggatgctccaagccataatgataaagtaatgttgtgaagagggaaagaggtttgcagtcagacagcctgaacccaggttctgccatgtacaggctgaagcttggcaagcctctgcacctctctgaggtccatttgcacctctctgaggtccatttgcacatctacaaaaatgcgataacacctacctagcagagttcttaggagatccagataacaaattgaaaacatgccagataatgcctggcacattttagaagcttgagatctactactggttctcttccagttctcccatcgtagtaatatcatctacagagcaagatggggaaaatgctcactgccagatcccattctaaagaggtatctccatctacagatttattgcacccgggctcctagccatacgcccaaaagtcaaactgaacaacagtaataatatttattcagccatgtcacactgaactgaggacctgacttaagcaacaattcagatctgccaacatttactaagcacctactatgtggcaggccgcgtcgtgaccccctggagagagaaagatggattggaaagtgtagcatcaaaattaacagcttggtttggaagtcagacacacctcaggtgaagatatggattgagtcataaactccccatgtggcactgggcaggttcatcacttgaactctctagacctcagcttttaaatctaaaatgtcccatagagttgctacaaagattacatgagatatacacttagcaaagtgcctggctcacagtaattgtcagaaacagaaagtgtcgagactcaaccctgcatggaaaagaaaataggacacacatactatcttagtccattcaggttgctataatagaataccttagattgggtaaagtagtctccccttatccacaggggatatattccaagaccccccgttggcacctgaaatcacagatagtgccaaaccctatatgtactatgtttttcctatacttatatacctatgataaaggctaatttataaattaggcatggtaggagattaacaacaataactaataataaaatagaacaattaccacaatatagtataataaaagttatgtgaatgtggcatctctctcgttcactcgctcaaaatatcttactgtattgtacttacttattttcaaactgcaagtggccatgggtaactgaaactacgggaagtgaaactgctgattggggggactactgtaatttactataatttataaataacagaaatgtattgcaaagtccaaggtcagtgcacaagcaaattcaatgtctggtgagggccagttcttcatagatggtgccttctagctatgtcctcacatagaagaagggacaaagaagctctgttaggcctcttttgtaagggtactgatcccattcatgagggccctgccttcgtgacctaatcaccccgcagatgctccacctctcaacaccactgcaatgagtattaagtttcaacatatgaatactgggggacatgagcgttcacgcctatgtaaatactacacagaaagatgtttatcaggtaaaagaaagtagacacggacagtcctcatttttctaagaataattggtaccagtacaaataccacttaaagagaaacttcttaaaacaaatgttgactatttactgtgatagtgaaggaaaaaggttggagtagggccaaatcttgaaaaaataaaattgaaagcacaaaaataagtcttttttattgtctagtaacaaaatgtaggttttagtgtcaaatgagttaattttttccattaaaaataggaattaccaagtgttgactttgggggaggcatggcacattttttagacaaaatcctatcttagcacagtctaacagttttgattttgtttgactttcacagcacaataaataaagagggtcatttggggcaaatatttccaagctttatccattttcccataggcctcttccaatcgttagaagataacatttttctcctttgaagcacctgacaactttgtcacttttctcttcttcggttgctaactagtttaactctgccagtttctcatttgcctgtagttaaatgtgaatggaaaagttatccaacaatacttttgctatttttatgaaatcctgaatctgtttaaagatttgcacttttcctcttcatcaatttcctttgaatttccattacatcatcagacatttacaacaaccaacaagccgaaggaaaccaatagatctaggttaaatgagtaaggctagaaaccagcgttaatgggaggtaaaacttaagcgtgcataaaacgtttaagtgaccggctcattcgtaagtatttttgtgttatgaagatttttacttctctatcaaaccttgtaacctcagagaattgaataatgacacttagttgtcaaattcaagataaccgacaagagaccgggcgtggtggctcacacctgtaataccagcactttgggaggccgaggccagcgaatcacctgaggtcaggagttctagaccagcctaaccatcatggcggaaacccaatttctactaaaaataataataataataataaaataactgacaagaatttctaaagtagttcagaatagaaagcttactaagttgattcatttaatggttacccttgatattttaacatgtactattacatgttaacatgtacccactaaatgtctagatctcattgatacttcatttaactcctgaacaataatagcttttcagtgtttggactctggttacctccttcctgatgcataggctactgttcatcattttagttctatcttgttacttttagtcatttatatttactatacttacagacactgttgggtttatttttagcaccttcctatttgtttttctatttgtactatctcttctttcttcctttatttcttcattcctgtcttttcaaaaattaagtaaatagttttattattgtatttttttccttatattggcttcttgtttcacattcctgaattttgtgcagtggttaccctagaagttttaatatatatatttagtttattatagtgtatttttaagttaagacttttacttcttcctgaacaatgcaagaactttacaacagttaaactcctgtacccacttctttctttttgtgctgttgttaaacattttacttctgcatagttataaatctgataagacattattgtcattttaaacagccaatattcttttatactaacccaaatatctctcctttgtagtgtttttcattccttcttgcaattttgtgtttctggattgaataattttccttcagcctgaagattcttatttggtatgtcctttagtgtcagtgtgatggcactaaatttttgctgattttcagcatttgtgtgtctgaaaatgtctttattttgtttcatttttgcaggattttttgctgtgtatataacacaagagtggcagtgttcttttcctcttactttagcattttaaagatttttctagagtccatcagtgtttgttgaaaaatccaccttattggtgcttccttgaaggtaatgtcttttttctttgttactgcttttgagaacttctctttacctttgttttcggcattttgactatgatatgtgtagttatgattttctttgtgtttaactttttggagggcttggtgggcttcttgaatcaatgagttggtttctctcatcaattttcggaaactcttgatcattgtctttccaaattttgcttctgcccagtttctcttcttgccttctgggactccaattatgtgtatgttagacctttgataatgccccatgtgttactcatactgttgtcttttaatgttcctttctcttttctctctggttttaattggaattttacctattgttctgtctttaagtcactgaccctatagtctgctatgtccagtctgctgtaaacccatatagtaagtttgtactattttattgattccaagtaactattaacagatactagatttgagaaggctatatgtttttgttcattttgcccatctttttctctattctctttaacagaataaccatagtcaaagtcctgtctgatgaatacaatagctgggtcatctatggatctgtttttattgttagctttctttttctctttgctttgcttcttttcttttctcttcttgctttttcacatgcctcataattttgaccataagctggacattgtatgtaaaagaactgtggaggtttcagctgatacattccaccagagcagcttccccctttcctctgttggagagtcagggtgaaggctgatgacctcagtctagtcagaaatttaagaggattgcagtttgagaaagactgaatcgaccacctctggcttttcccatttccttgtgtggtcttcatggctttggctgggagcctagctagtctctgtctcctcagccctaaaagcctgaagagattcagtcctgctctttagaagttttgagcttttctggctatcttcaaaatctggcaaatatcttgaggggaaaaacagggatttatgtcaggccctttctctctctcatggaatgttgtctcctaagtcccgtgagtttagcagaaatttcattccaaccttccatcctcatttcccagccacctgagctgcatagagcacttagcagtgtcctatgcgttaaagccaacagtcacttggcttcttatatttcaggcttctcttgtttccaatccatcatgccagccctgcacaactgccaaaagtgctgcttggtttctgctttctccagtagacaacctctgcttgggccaatgccagtcctcaacccacgtccagaatcagcagttgcccacagggaagaaaactgtcaggagttatcagcctacagaggacccactttgtcctcatttccacagctttctgatgtcttcaaattttctatttttgcggcttttctttttttttcttaatagttgttgcagtaggggagtcagcctgccacaatctactacatcttacctggaagcaataccttatcttgttatttttaagtcaacaaattagacattattattattaatatatacagcaatatttagagtcactcgcacataaatattaatttagagttaatcacatatttgctttgtattcctttttgaatctctgactttctatctgtgctaattttccttctgactaagccacatcttttagaatttcctctgtgaggacctgttttatttattcaaacataaaaaatttgtttgctctcattcttgaaatgtaatttcactaagtattcatttacagttggtcaattgtttcctcttgacacatggaaaatatcattcctctgcctctggctttcattgttattgttgagaagacagatgttagcctaattgctatttatttgtagatggtctaacttttctctctaactacttttaatatttctccgtcacaggttgtgatgttactttcatcttctggaattgttcttccacatcttatcatcgtcttccattatttccatctttgtctctctagcttgttttatttataactatctaagagtttactaattgtctccttagttctttgctccatctatatctgtccattgtgacttaaaatttcctttttttaacttttattttaagtttaggggtacatgtgcaggatgtgcaggtttgttgcataggtaaatatgtgtcatgggggtttgttgaacagattatttcatcatccacatattaagcttagtatccattagttatttttcctgatcctctccctcctcccaccctctggtgggccccagtatgcattgttcccatctatgtgtccttgtgttctcatcatttagctcacacttataagtgagaacatgtggtattcagttttctgctcctgtgttagtttgctaaggataatggcctccagctccatccatgttcctgcaaaggacataatcccctttttaatggctgcatagcatttcatggtgtatatatacctcattttctttatcctgtctattgctgatggacatttaggttgattccatatctctgctattgtgaatagtgctacaatgaacatacgcgtgcagctgtctttataatagaataatttccattcttttaggtatatacccagtagtgggatttctgggtcgaatagtatttctgtctctaggtttttgagaaatctccacgctgtcttccacaatgtttgaactaatttacactcccaccaacagtataacatcgctcctttttctgcacaacctcgccagcatctgttattttttgactttttaatagtagccattctaactggtgtgagatggtatctcattgtggttttgatttgcatttctcacttaaaattttgaactaatgtatttttcatttctagatgctctatatggttatttttcaaatctgctaagacatttttatagtgtcttattacttgctgaaatgttcaaacctcttttatttcattaagcatataaattttgccatctcattttctgtgctaataaaaattctaatatcggaagctttaataatcagattctgctatctctttttcctgcaagccttatctcacagtaccttgttttcttgtgtgttttacaattgttgacagtgaatattctttagaactttatccttgataattattagaggaatgaattaaaatttcacttctccggaaagtactgtgtttgcaccttttaataactcaagagaggtaacaacccaagttcattttcaattaaaattttcatttgaggtttttcagaccacaaacccatgtgagagctcacatatggttacaaattcttgaagaaaatgaggctccttccttccccatccaccttcctagtaccaaagtcaggacagacaggttttctgtgttagttcacttctcattcacctttgtattaaaggtctagctctttgaggttcaagttttatgttgggacctcttcccacttggtagggcctgggttttacctactgggtttctaagcatattttgtggttaacatcagaggccaggagactcatcagtgtataattaattcttgtataactaattatttaaaggcagtggacctattcactagcaccctgctttcggagtcactgaattcatgtttgccctcagctaaagccatcctgaacctctttagatgggagaaccctgatgctggtacctgtagcatgggggctggggctggagaagccaagtagtacactagggacctcacggtcactgtgagggatgggggtctctgcttggcttctgaacacccaaaagtaagctcttctgccttcactccatgtccactggagcctgggatcctctcataagaagctatatttactctaatgaaaaaaaatctcacctgggctgaaaaagcgtatgctatacatgagccttggttaacctaaactttcatccagagtttcaaggattaaattcctaagttctttttaaagcaaagagaagttagttccagtcctaggccatgataatgctcttggctgagaaaacctccttcgtttttttaaaatatggattctgagggtgcaagtgcagtttcgttatatggaagtattgcacagtgatgaagccatggcttttagtgtacccatcatccatatagtgtacattgtacccaacaggtaattcaccatccctcaacccccctcctctgttttaaggaactggcatttatgcaactaattgataaaattatcatctgtctcttaaccagattaatagtataattaaggaaatctgggatgatgatagcaggtttactgttgatgaaaccattgaacacttgatttaacccattaacagtgtttctgaaagtatgttccttgaaacactagaccatgaaaagtcctttatgttgaaatatgcttaagaaatattatatgcttgaaacttctcttggaaactcacgaagtatattagacattaaaggctctaagaaatcctgcaataaagaagcctatttaattttatttgactcggtgttttcaaattatgtgtgaccacagaaatagaaggaacttggaggagtaataattcattttttgggtagaattcactactgtcacagatatttgtatgctgtcaatgaacatttaaatgtggattatagagaaagtaagatttattcaacaaatatttgctgaaagtccactatgtgcttaccactttgagtatacatcggtgaataaaaaagatatagttctgtctcatggagcttgtaggagcattggactgtcgtggaggcattaagaaagaagtagcaagtgcctagaatccagctgcccctcaaattgttggatcacagccgtggaacaggccccagagctgggaagttgactgggcagttggctgttgtatccagcctgggagatgcaaaatttattgacataactgtacccctcaagaggaccataaagaagaccaagcagaaacacacttggttctggaacagaaaaaagtttatctaggaaaggaagtttaggaaagactgttagataagaaactgggtggtttttaaggcttgcagaatctcttattgatctgagaattcctcccaaaacaatccctctaaaagtgcctgattcataatccagtgaatgttaacaggaatgacgatgatgattatgatggtgatgatgatggcaatgatgatgatggtgatgatgatggtgatgacaatgatggtgatgatgatggtgatgatgatggcaatgatgatgatggtgataatgatgatggtgatgacaatgatggtgatgatgatggtgatgatgatggcaatgatgatgatgatggtgatgacaatgatggtgatgatgatggtgatgacaatgatggtaacagtgatgatgacaatgacaatactggtgatgatgatggtgatgacaatgatggtaacagtgatgatgataatgacagtactgatgatgatgatgatggtgatgatgatgacaataatggtgatgacaaggttgatgataatggtggtgatggtgatattggtgatggcaatgatgatagagtttaatctgcaactccttcccttcactcaatgctatggccaattggccaccaagaactgtgagtctacttcataagtaactaactcttaagctcatcctttaatttctttggaacagggcttaacctttctcaacagccccctcatctcatttaccttctttcagtgtgtgttcttccaatctgtctccacactgtgccaatgtaagcttcctaaagtttaagtctgggtacaggcgcactcactcactccgtgcacttttacacttttatgccttttttgtgttcttctctacttgtgttttctccttcttgtcttttagcaagacatgtactcatccttcagggtccagctcaatggtgagagcctctctggggctttggctgatctcaccctggaatgcactgcaatgttcctttgcctaggttcctgcaatgctttctccatttatctgtataaccctcaccacttctaagattacgttattatctgagtctgtggtgagggaacataccacatctgacctacggttcattgccagccccctcccagagtggaacactgaaggcacatgggcaactgttgcaaacgtgcagggtaaatgcacccccatggagtgacagctatgcagaccagagcccccttctcccaggttctgtgttgcccacacctttcttgacagtcctgggccagggcttccccaggtttggaatccagatgagtctgaaagcaaatgtcattctctttccttcaccacacagtagcatttgttcttgccaaggtagctgtgtgtgtgtgtgtgtgcatgtgtgtgtgtgcttgagtgactgtgagtggttgtgagagtgtggatgagagtgtgtatgtgtggcgtgtgactgtgtatatgagtgcatgtgtttgagtgtgtatatgcgtgtgtgtgtatgtgtaggtgtatgaatgtgagtgtgtgtatgttcaagtatgtgtgtgaatgtgagtatgtgatgtttgagtgtacgtgttagtgcatgtgtgagactgtgtgtttgagtgtgtgtgtgtatatgaatgtgtacgagtgtgtgagtgtgtgtatgtatgagtacacgtatgaatgtgagtgtgcatgtgtgtctgagtgtgtgtatgtgtttgagtgtgtgagcgtgtgttgtgtgcgtatgtgtgtgtgagtgtgagagagaatgtgtgtgtgtgtgtgttcatgccgatgttcacgatgggctggagggaggaccagtcccctactgcgtagatcgaggatgctgcctttacccagtcttcatgaagttataaaaattacagccatttgtcacaggtctctcaacacagcactgggccctgggaggaccaggccacatctcttggcgtctgaaataaatgaactcatttattcacacattgaggccacacatgtttgttgcaagtctgtggccaggcacagggctgggagctggggaataaagagctgacccaaacagcagaaccagtttgcgttttcatggaattcatgatccgctgctctgacagtgggcatgggtcagacaatgaccaagtaaacagatcagtaagatcatttggagaaacgagaagggatccaaaggaaagaaagcaggaggccacgaggaggggagtgtggaggagtgaggggctgctttaaattcagaaatccttgaagactgtctaaggaggtggcgtttgtgttcgggcttccataacaggtagggggaagatggaaggctgctccagaccagtcagggagaaggggagtgagggtggttgtggttggaccacaggaaatgcaggaaatgaaagggagggtggtaggaaaggcaagggctagaccgcacagggcctttggggccagcgaaggaagtggattctatcctgagtgcaactggaggccactagaagggcttacgcaggactgacaggctccgattgatgcttcccaagttcagccgtgctgcagggcaggaactgtaggaggagatagcgtggcccagaaaggcagtcaggagctgtccaggccagctgacgctgacgatgagtggggcccagagcttagactccctgagactcagccctcctctcccgcaggaccccagcagccagccttggagggctcccaaagaatgacatcaccctcagctcccagctgcttgatatgcagggaattcctcccaaggctatgcagaggcctcaggcttcagcagcaagctgcggcccgtgcctgggggagagaggaggggaaaatcgtaaccccagcagcacctcctcccgtgacctagactctgggccagacaccacaggcattttctggataatcctcacaactgccccatgagggacacctctgtcgaatcataaaatcctgaacagggaaggatgcctggagatcatgtgacctgtacccctgtgtcgaaacctgtgtattcctggttcttgtttatttattcatcatatccttaaataacacccttactacttttcaatcacttgaccaatattaattttcatagccacttcagaaggtcagaactatcattattcccatttcatggatgaggaaaactgaggcccagaaaggcaaagtaacttctccaaggtagcactggccatcatttacatctaggcagactgacccagaatccatgttcttctaggctgtacatgataccacctgctctcggttgttcatgagctggcacagtggaaagagctctcctcagcgggctggagcatctcttgtacgcccagaggtgtgggtgagctgttctgtggcacaattgtcatcctggggtctgcgacggtaagactcacctcagaggaagggctggcctttcattcctagctgcaattccttacaagtaagaaggagagggcctcaaacaggaaacctggggtgaagaggtgaacctcagatgcctatcttgtttaaccttctgtctccaggcttagcacagtgcctggtacagaggaagtcctcagtaacattgttgagtgaacggatggatagatgtgtgtggacccgggttcatccttcacatgagaaagtccgtgagatgtttacatccaactcaatatctagcacatacaggtggacaaggcagaaaggcaatgtcatggctcttgccctcacactctagggcctagactggtgtgacaatgtccatgcttacatgtcctgtctaaggaaagcagctcccgttggtcatgcctgtggaaatgtggccctgtatggccagctcttctgatttttcataagaacctggatggacagatgccatgcaaagtttttttttttaattttttaaaaatcgtgtgtatcccaaagaaaatattatctaagggtgaaatccagcccagggggcactagtttgagatgccaggtctgggatcagtagcaggtggcccagaatggggactgggttggtgaagactaagaagaatgagaagctccctggagcctccgagaggaaggtacattttgcatgccagcttatccggattcgagacttgctcgatgtttattttctggttgtcactccaggattttagttaagtcttgtctaacattgcagccaggctcagccattctgtaggaggattaaaggatgggactgtgtataaaattgggccaggatggcaagcgagggagcagctcttgaggccagaagagtgggggaagatggcttgatgacagacggaatctcaggcacctgaagagtcttagaagccagatttggggctgagccgcccttccccaagtggagattcaccagccatggccagactcgaggatgtgagatttatttttcttaagatagcaaatgtctttgcaggcatgcttcccagttgggaaattctttttatgctccatgtaatccgtctgccagagcctcctttgactctgtttatcggttctcttcctgtatgtgtcatgctctccttccctctctcctcttctccccttctcgtcaccacccctttgctctgcaccacccagagcctgttaggaagaaaggggggatacactcatcctggctccatttagggtgggcttttaatccagacatgtcgctgacaccagcatttgcaccaggtatttaattagaccaggaagtcccaggggatttgagaagctggctggcgaggaatgggctctatctccatatcttattttgacaagcactgtaattatccctcattgctggcaggcggagcagaatcacgttcgttcccagccccatcttctcagaacaagagtactcaggctcctggttgctccaccactaaacaactgcctgtctcagttccccagcgagaccgagactgagctcagccattactcaggagatcgcaggcgggcgctcagcctactttttgacagcatcgtggaggtgatttcagagcgcttgctgcatgcacatgggaaatagcttccaaggaggatctttgggggcagaaggaatgaggtgggcaccatgccctccaaaaagacagaagttacccctccaggagccagcatgaatggagcacctaccatgtgcccatttggtattgaatttaatcttctcaatagcactgccaggtcagtgttatcattccatattaccaatagggaaactgaggctgtaagtgaggaagctgcagagtcagttgcagtggcctcagaattccgaccaagagctagctggccccacggtttcttcccttcctactttacagcattgtggctcagggagagcacacatgccctcatgctctgccccaaacaatttgtgggtgctggaaagttctggccatgtcaggagcaagtgctttctcccttgctgtgctgcccaaaacttctttaaggaggttaccctcatctgtcaaacagggatgtccctgtctgtcccacagagtcttcatgaaatgaactgagatggcatattttaaagccctgggaaaaccgaggcagcctcgggaatggtgacgtatctggttattgagactgtcttataatttggggcgtgaaaacctagggctacagggacacaaggtaatgagaggaaattgccaaggaaagcgaatgcaaaggaaacaccacccaagcccagcctggcttccaggtaccctctgaaccagcctcctgccccactgtgggccagaatagaccagcctgctaggaaaacctttggcccactgcaacaatgacaatcacaacaactcaaccgtttagtgaacacaaaatatgtacgaggcacgggattatgcacaggaaccacgtccgtacatttcattctcaagatcctatgaagtaggtgttattatccctatttgatggatgagcaagctgtggttcattaaaccacatcccccatgtcaaacagcaaacaaggggtgaggccagttggtcttgacagtttgtcaaaatcgctgtgctagaaaaccaccctccttactggttgtgttccaggggttcccaaactcaagttcttcttggaggagctgcaagaaatgatttgagggtgatagcaaggaagaatgcatctgagatgccaggctcaggagattcctggagtcctgcactgtgtgccctttggcccagaaggcccttgtaagcacctttaggtgttgtctgcatttcccttccctttctggtcagggaccccagctctctctgcatggattctcctctccaggaggtggggggtgggagccgatgtcaacagggaagaggggcagaggaacaaggacagggatggggagaggaagaaagaaggaggtgggatgtggcagctgggcccggaagcaggctagagccagctgcacagctctgacaatctaaagtgtctcttccgatggtctccattcagccccatctgcagatagctcattttgtgaatgaggcctgggtgtttgttccagaaccttagctgtgattaggaaagacaggagcacttgggaggccccaccttcaatgcaccagagtatttctagaccctcattctgcagtcagctctagctgccacatcagggaattcttgctggtctgtagcctggattccaattgtggatgtggcctgttaaaactttcctgggtaggacagtgtgggcgttctgccttaggagtcagacaggcctgagtttatatcccaccatttccatatgctggctgtgtgaccttgaacaggtcccttagcctccctcagcagtggagtggaagattaagtgcacagactctgaagctaagccttctcccatgctccagtcccagctctgccacttactaactgtgtggccttggcaaagtgacccaacacccctgggcctctcttctcagctgcaatacagggctaatacaggcatgcatcttatggagttgtcaaaaggatgaaacaaattcatgcatttaaaggacttggcacatggtgagtgctcagacatgttagccagtatccaggcatggtggctattttctggaataaatatggataaactgagacaactttctctcctgaagatgggtccattgcgaagtcatctcaaagaggtgtggcctggagaagtggttccagtacctcatgccttcttccccttccctccttctctcctgcctccccctgcattcttcatgtgcctcctgctgtaagcatttgctgagcctcctgctgtgtcccaagctctgtgcttggggtcaaccacccagaaatgaatcgtgtgggtcccatcctctccaagacaaacagttagaggatggtcagatagtgccagtggagagcagggaaggcctcgtggacaacatcctatttgagccacatgaccatcagggaagagcatttctaggcagaggaagcagtttgtacaaaggccctgaggagagaacaagcttgagaaataggaagagtgcccgagtgtctggagtggagggacagggagaagatgggtaggaatgaggttgagaagtagctagaggtcaaatcatagagagctttgaagccacagtgagaaatgtgggcttactttgagttttctagcataaggttgttctgaagattaaatgacaggagacaggtagagtgcttggaacagcatctggcgcattgctgggccttaaataattgttacttttattatggtggcacttatttccatattcagccctgaggctggctgtggtctactaggaaattattggcattctggtttaggagagaggacttgacgggatttgggtgacaagtctcagttctgcccttccctggcctagccaagctcccttccttccctgagtttctataaaatggcagcatcacattcccctccccaggtaatgtgacaatgaactttaatgtaaagtgccacccacgatcaaggaatctcatcatttaaactgcttttgccatctaaggtcagaaggcttaaactgagcccgtaattacatcaagtgcctgtaatcctagctacatagaaggccgaggtgagtggatggcttgagcccaaaagttcaagaccagcctgagcaacatagtgagacccagtctccaaaagtaaataatttaagagaataaaaaattaattttttaaagaaggtttaaactggttgtgacctaaggaaacaatttcttccagccgcatcattgaacaggtgggacaccaagctcccttgtagataaagatcgaggtggaatgggagtggacactgactccatctaagatcatggaagcgctctcacagtgaccctactgggctctctggaagctgcatcccagcagctgtgcagcccctgggaccagccaggagtgacctgggtgctgccgttcaacccacctgtacatttcccaaaaagaggcagccaagtgctgattcagggaatttaaactttaatggtcccccggtctattattatgttttaatgaactggaaaagcacaaacagaaatccttaagagcatcagccgtgacacagaaatctaatacaataaaacaaagtgcttataaaccccagagttgtttaaaacccagaaattgccaattgacatatgggactatatcttcttagcccctagtaaactgagtggcttcaaacaagtccctatcacctcccagggcctcagtttcttcacctgtgaaataagaggatcaaaaaaagataatgttctctctgttctcttccaaccgaggcaggcatctcaagtatttcttagtcagttctactctaggctacacagtatctgtatctggcagctgtatgaactactgttgaaaatcctcttcccaatcccagtttcaacatcactcctcaaggcagcatccaccttcactctagactgaattaattcctctgtcttaccacctaaactcctctagaaaacttgatagaggtaaagataaatgcattttttcaaaaattctacttttctagtcccaaggcattgtgtatatcattcttatgtaagttatcacaataaacccataattagttacttccatttatgtcaaatcgcctacaaagcagaaacatgtattattcatttttggcttcctccccagtatctagcatacgaactgtttgcaaacatgcccagttcttcaaactttgtaacttcatgccttttctatctactacttgggatgggcccaccctccctttgtcctctaagcacactcctattcatccttcaaagtccagcacaaaaatcccctcctctgttaaacttcaactgctccaggctgagtcttatgtttgggtccttcatacgtacccctcttctattgtttggggtattgtgtgctgtgggatctgtttactctcagttctcccctctaggctgggttccttgaaaaacaccctctggacatttcacctctacatcctctgcattcttggccaggctctgagagggcattggtaaatgttaactgcctggcaatggtgatgctgttaacctgatgtgtcaggggtctgaataaagctgcctcaaggtaggcagatgcccacaaccaagcaagaactcaaagctgcaggctcctcagcctgaaccttagacagcgtcttggtcaccatttcaacaccttgaccacatttctcactctcccaaatttcctcctgcttattcctcatccacatacataaggctgtgtctcccaggggaaattcaactacttggtaattatcctgcttcttaagtttggggctaggggattcatagatgatgttcagtattatgctgtgcaatgtagatgcttcctaaaccttctcaggagctaccactgagtggcacctggggacctctcaggaagagccagttttctgggcagtgtggggcaggacagagctcattaaaccagcctaccacctgtcttccagctcctcctctcagcctctgggcttccagcagaaagcacacgagagcattcttgttggttttcttatgacttgagccagcgagacgtacatgcccagcacctgttacctgggctggctcttggctgagagcatacatgcattgggtcaggtttcagatctgctggaggaacacagccagaatgtcttgacaggcagccctggcaaagccccagaaaatataagatctgagtcttatgatggactctgtgaccttgagcctctcacctcgtgaccttgggcatctcatgttctctccacaggtctcggttctggactccttcatgggagctgtcatgcccctgtcacacagcagtgttgtgcccccggggatcagggaccaggatggtcctttcttggtggtgaagggggcattttgcatattccagagattcaagtttccagacctatctagaaagaaacatttgagtttacaggttggcgcttctcagcctctgtctctcttcctctctgttcatctccctctgtcccctctatgtatgtttgtgtctctttctgtctcctctgcctttctttgtcatgtctttctgcttctgtcctatactgtctctcacctccaccctggttccccccgccccagatgctcttctctctgtggggttttttcttcccctccatttccttctcctctcccactccttcctccccagattctccctcactacaggcttctctctaatctctctctaactgcctattcttctcacaagaaggagtcccctctggggcccagaggccaggcaaggcattgtggacaaggagggcatccgtgccatccaacgggcaggagcccagcctcctggctggtgcgtggctgtgctgtgggtttgtttccacttaccaaagggcatctgtaattaatgtgggcagtgataaaggagctggagatgtgtttatgctccttcgagggctgagatgaaacacccataacatttaatgtggcgcactgacatttaaatgtcaattagaaagtccccgctctgcttggctggcccctgcatcctcagatgagaccgccctcctccctgccttgccagccctgctgggaccaccagctcacaaaagacagtggccacacagcaaccgtgactgaagagtgtgcagggtccaaagaggctaaagtggctttaagagcactccggagggggaggactcttggaacagagaaaggaggaggatggtgccaggccaccaccaaaggcacgtggaagggggctgggcaaatggtgaaggagcatgtgggagacaagtttagaggtagcgttggcttcctcctctcttccctcagtacctacagggcagaatctagagcttgtttgtgccttggcccttaggcgctatgtttctgcctctgtggttgatcaccctccattagaccaagggcttcttgagaccaggttcccatctcttcatcacacaggacgcctatgcacacacggtgcctggcacacagtaggtacacaaggtagtctattcagttcaatacagtatatattcgttgagttcccactgcgtggtgggcattatcctaggaactgaggctacaacaatgattgggactgagacctgcccccacagagtgtacagatgctcttcaaattaccatggggctacctcctgagaaacccattgtaaatcaaaaatacagaaatcaaaaacgcatttagtacccccagttaatccatcataaagtcaataaattgtaaattgaaccattctaagtccagatgctccttaacatacaatgaggttatgtctcaataaacccatcataaagtcaaaaaatctgaagtcagaccgtcgtaagtcagggatcatctgcgttacatttttaaagacagacagaaaaatagatatgtggcaaatgtttagatggaagcaaagaaaagaggcagccggcccaccctggatgacaagaaagcttcttggaggaagtcaaatagagctgagacccaaagaataaatgtgcatttgcaagacagagaggcagagggaatactggacagagggcccagcacaagtgtggagccaggagggagcctaggagtgcacaggggttggtggcaatgggcacagcagcttccttgtgaaatctgagctcagagaccacatgactgcatggggttctgcaaccagcacgtgagctctgtgagggcaagggcctcatctgtcttgtccactgctgtgttcccagagttggggaaagtgcttgatgtgtagcaggcactcgacaaacatttattggatgagtaaatgaatgctgtcttcactggcctctcctcccttgtccagttcccaaagctcagtgggtccccgcaaatgcatttattttgcaaaagcctttcccaaagcctggcatccaatgggtgcctcatttcctcatcccctgcacgccgtctctcagtccctgagctgctgtgcccacgacatgctccattttctcataaaagcccttccaacaaggggcacatttgcatttcaagtttcctggaattggagtacagagaaatctgacttccagagcccagggctctaagctgcagctggagaactgaaacacagcaagcaggacacctgcccagaataaggttcaggccctggaatatcacatgggacccatgctcctgtagctgtctgcagtctcgagccccaaggcagtagaacaggtgttcatcttctcctgcactctggaaatggagtccagggcctgagctactgagtttgtagactgcaactttggtagcaagaggcatttctcctcctcacctccacccacacacagatctagttcccctcgtacgctgccctttcagtcttggacactgcagaagacctgctaggagagcctaagaaacccaaagccttcccacctgccatccaccaactatcatttactcacccccactcctccagagtgcagatgactatttcacttactgatttggcaggcgctgctgctcctcaccttggttggagtagagtttaccctgcccagccctgcaggcccagtggtaaagggaaggaggctagtgattattccgactttggatcaatcagttgctcagtttattggaattacatcccagtggctgctattgatggaactgctggactcgggcccacaatcctcatgccagttttataacactgacatcacctgctcacacacagggcttcctctcccatcctgtccccatacctcactctgtagcctgagatttctaaggtgggggatctgcactgggtgtttggcataaatgatgtaagagatttcctttgtattgctctcagctacatcttacctttgtgtaagaatgcaaagtcataagcacagtttacaattgcaatgggaggtatgtgctagttttaaggtgttttgtttttttttttgtttgtttgtttgtttgagacagtttcactcttgttgcccaggctggagtgcaatggcacaatcttggctcactacaacctctgcctcccaggttcaaacgattctcctgcctcagcctcccaagtagcttggattacaggcatgtgcccccacacctggctaattttgtatttttagtagagacagggtttctccatgttggtcaggctggtttccaactcctgaccttgtgatcagcccgcctgagcctcccaaagtgctgggattacaagcgtgagccactgcatcaggcgttttaagtttctaccatttggggcatattcaggaagattcctatcccaacacaccccttccttctgcttttataaacacacagagtccccaaccaccctacgtcctctttcctccataaccacgtcacagtgcactgtaaacacattacgaaccagctatgcaataacaatctgctgaatctcagagatgcagaaagaaatcactgggccttctattgatacattcttatgttatcatttttaatttctataattatgtttttaaggtacattgtgtatcagcacagcagcagatgctaataatatattaaaaactgtactcgtgttctgggagtgttcacaaattatagcttcacactattctcatcttctcccgcctctgctcagatgtccttgaaacatctctaaggatcctggaaggcaaactgactacaacacttatttgcacagcacagcatctttcctatgacacgtcttttggtttttccaatcatcaaaagcaagaggtagcaggagaccgagctgttaggcactgaccgtggcattgcctccagggtgaattgcgggggcacaggaaaaacagctcagattcctagcttttccccaccttcctgatctactgaaccacactttctccagggatgtggcccgtgatctatattttaagaaaacacctcaaataacttcccagccaggtgtgtgcaccacagtgctgggacgtggtattgttcttgccatgggaggtgggagattcttgtccatccttcacccagaagcctgcatgtggtttgtcaatttttttttattttatgaaactttttttctgtttacactcttgcagaacaaacagacaaattatatagctgatgtcacatccctttgaaaaatctatcaggtttcatccattcattcaacaattgtttttaccagttacactttttttttcatttgccatatacagaaactgaggctcagtgagactgagagatttgtttctgacttagcttgtaagaaagagattcaggaactcaacctaggttacctggccccaagtcctgtgcccttttaattttacttccgtacattttaatgaaatggctgcgagaccagagctctgtgtgtgaacaagttgtgcctttcaaccttcctttatctccccttctctttccccaccaccaagagcaggctgatgagaaaattaacattcaggacacgttctgctcccttctgattcccacagagagaacacagcctctgcctgccaattagtgacgttcagatctctattagagatggggacagctagttccagttatgcaaatgcccttgtctgagagtagccatgggccagcagcatgccagtctcacctctccccatggagtcaccatggatgtgacttgcacctcccgtgttgctttaaccaataatcaaatcagtatctatttatataagcactggccaaggtactgcaggaagctcagggacagattttatttcagcctaaaggaacttacactgagtagagagtgtggccagggaaagggcagatctttcaaagacactctgttcttctctaaacactcacagtttctatttattacccaaaaaaatacataaggaaaaatacctaacatttgttaagtacctactatgtgccaggcactgttagacactttatacacattatctcattcaagtccattaattttatataagaagcaatatgctatttggttcaaggcatgtgttttaagtaggaaaaactaggatttttaaaactaggattttaatcctgccactttctccatgtgggacttcttgacctcagttattcatctgcgaaatggaaggaaacaatgtctgtttgccaggaatattttcagaagcaattagataaggtatttaaatccaagcacctcatcttcatatgacacagcatagtgttaagatgcctaatatgtagggaaatgacaaaaatggacaaatgcaggatattattagcaacaatgcaaaaatatctgtatatggatgaagagtggaagaggacaattatgggggaaacttgttgtcttttaatttctgaactatctgtattattattattattttagatggagtctcactctgtctcctaggctggagtgcaatggttcaatctcagctcactgcaacctctgcctcccgggttcaagcgattctcccgcctcagcctcccgggttcaagcgattctcccgcctcagcctcccgagtagctgggattacaggcacctgccatcatgcatgactaatttttggttttttgtctgtttggttgtttgtttgtgtgtttgttttgtagagacagggtttcattgtgttggctaggctggtcttgagctcctgatctcaggtgatccacccgcctcagcctcccaaagtgctgggattacaggcgttagccaccgcgcccggccaactatccgtattattatgtattttcatttaagcttttaaaggaaaatggaaacactgcattaaactgagcctcagagaaattcagtgacttgtccaaggtcatacaaggactggagggaccaaggcaggatctatccattttcaatgcccatgctttcccccacacaccatgccaccacatgtccctcaggaaacaggtctgcaatgattcaggagacctcgtagtctacattgatagatgtaaacagcattggtttctgtcttagagagtgggccagtgaggaaggcatggatcaaagcaaaaagaaaagccaaggagggggaggatggagattaaacaggtccctggttgtcaggggcaaaactgttaatgacggtggagcaccatgaaattaatgacccacccaaagcacctgagaaattgaactggttattaaaatgcaaatcataaaccaggaaaaggaggaaaacaagcacgaggaattaggaagaaggaagatatggcatggagtaccacgaacagaaagtctgtggccagcacctggatattcagagaaagagtgtgatttaggcttcagaagggcaggggtctgtagcttagggactgggcagagctgttacctagaaaagctagaaacagaaatgcataaatcccagttgtccctgacagtgggatacagtcagggcctgaagtgcaggggaaggccatcttaggtcagaggcagtggttcttggcatacagtggttttccccctaagaatgttaggcaatatttggtgacatgtttaatgagcacaaccaggttaagtatctactcactgctaatctctggtgagcagggagaccaggggtgctgctaagcatcctacaaggcctggggacctccccaccaactacagttatccagtccaaaatgccatagtgtcgctggggagaaaccctgatctaaggatgagtgagaaggtggatacaggaggtgaggaggtcagaagtcagaccaaacatcagatgggaagctaggaggaaaagaggtcagaaaaggagttatgaaccaaaggacaaaaggaagttaagtagtcagtcaggagatgaggatcatagaggagatcaggcaaagagaagtccagaggtggaaaaaagcttcagagctcagacgggctgggctctaacaatcatcacagaagcagcaaagatcaagaagcaatggggaaggacagttgaggctagcgccagggggaagggccattggtgaggagcctttctgatcagaagttggatggagaacaccatggtggatgtggatggaggtcaaagtgatgatgttctggaaagcagtttaaacaaaacaaggggcctgcgtgctttactaccagaggccatctgttaatggatgatgggaaatgccactcttggcccccacagtcaggagcaggtcaccttcaactgggcacagcaacacgtcccactgcaggcaggcacaaaagcagaggctcattaaagagctgccctgggcccaggctacatccttggcaaaggatgagatttgcacccaaggtcaggatggctcgggtgtgtggagcacgggctacggagccaggtcaatggagttctaaatccctgatcagcaaccttctacagatgtggcctttgataggtcactgcctctctctgaagctcagtttcctcacctataaaaatgggatcgataacagaggttacatctgtgtggatcacctaaactgtagaggattttgcaaatgtgttgttgtggttgccattcttattgctggaacataattccctcattagtatttctgagtgctctggtgcatatctgctgcagcagaatccttcatgcatccagcaaacatttcctgggcatgtagtatgtcccagacactgtgctgaacactaagattacatggaggaatagagattaatttctgttctttgtttactaagctcctaggggctgaaaggcatcttaaagtccataaacttcctcctgatgcttaagtaccctccacaacatcccacttatgtgtcctgggcttgcacacttctggtgctgatgagctcaccgcctcctgagacaggtgattccttctacagaccactcagactatgagaaagttcatgccgggtgcagtggctcacacctgtaatcccagcactttgggaggccgaggcgggtggatcacctgaggtcagagtttgagactagcctggcgaacatggtgaaacccgtttctactaaaaaaaaaaaaaaaaaaaaaaaaattagccaagcatggtggcgggcacctgtaatcccagctacttgggaggctgaggcaggagaatcacttggacctgagaggtggaggttgcagtgagccaagatcacaccactgcactcccgcctggttgacagaatgcgactccatctcaaaaaagaaaagacaaaagaaagttaatatatacctgtattgagctgaaattctggttctggccctttctctgcggctacccaggcttgtgttttcatctcccacattacctcctattagggactttaatggatgacatattgtcacccagcctcctctgctggatcgggatagctttccatccagacaaagaattttcatgactgagtgaccatccccaggatgggctttggtgtctctcttccctcagaaagtgggaagctccaagtgctgccccctgaaacccttttccagtaaccatggcctccaggggtcctggggtgatctcagaaaggtagacagacctctttagcagtaacctggaatattttgctaccttcctgaaatctagagaacagagcaactttgcaagcttcttcaaaggagcccgttctgacccaggtcgatggagctcccaaaatctgcacccccaccccccgctgctgtgtgcaacaggagaggggctttcccggaccagcttttccagaaacatgaattctttttgacacttggcaaacatttggggaccctctcagacctcactctgggcaggcccgaactgtcttttccatgccagagggcagtccaggttcctatcagagttatttgaataatcttcccaacacctctgagctgcagtttcttcatgtgtcaaatacagataacaatagtacttcactcataggattggtggacaaagtcagtgaggtaccaggtggaaaaagaggtagaacaagctgggctttgcggcatgccaccgtagtcctagctactcgggaggctgaggtaggaggattgcttgagcctggaagttcaaggctgcagggagctatgatcacaccaatgccctccagcctgggagacagaacgaagccctgtctctaattttttttttttaaagaggttgaaaggtgtctggcacttagtaagccttcaccctagttagctttgctaggattatgatttccatccagacaaagaagttgccctcagtgacgttctagcagagtcatcaaaattgggttaaaaggaagcaatttagcatggagcgagcctaaaaatgcaccaaagtaatgaaaagagcaaagcatctagacatttgatatctggctgtttttccctaggaccattgtcatggatggggataggagagccatctaaggtccctgcccatctgcaacactctcctgtttctgctccgatgctctacgatgtcgtacgtggcagagccagcccagcgtggacttcagctctcccagtaactggctgagtgatattagaaaagtcactgagcctctattttctataaaattaagaaaaatcacactcccttataaaatccttagggaaattaaagatccttgggaaaatagatctcttacaggcatatcttggatacctgatcaatgatagctgctatagtcttcttctgatcatgcttttcataataatcatcttaatcattactggcattcaaagccatgaagcacctgggagaaggagaagctgatctgtccatgcctgtctcctttggaaaatgcacgctgttacacttccccacatgttcaaattcatactctctcccccacccccttttttgagtgcccccaataggcacttgagaaggctgaagctgggattgtaaactgccagatctcctgccttgctctcaccccttgttccaaatcttatcaaatattaaaagctgtgaaatagaggcaggttttaaatcattttaatcacagcattcctcagcctgctcaaaagggctcaaaggaatcgattcagaagtggtaattatgactgtggccccgtgccaggcggcgggtcagcattggagcaccagcgacagacggccggcactgactggggagggctcctcccaggtggggacaccgaacaggagatgcctcctgggaggaaataaagctaagtcatcccaggctgggtatcaggttttaaaattcataaccaagtcaactgaaaatcagcttacctttattaagtcccccactaagtgccagatgcttttagcctcatttaaccctcagataactcctggaggtatgtgtcattatcctgatttataagtgaggaaactgaggctaaaaaatgataagtagtgtcccaaagccaatcaaaaagtagctcaactagatctatccagcttggaagcctgcaatttgttctctgtgttttggtcacgctcagattctgaggactgctgcaaaaatgttgaaggaggtgctacccacaggtcccctgctgtccttctccagcctccaccatctgcccggtcctcactcactttcctccctcttcccccacattgtcttttggactctggttgactcttgctgtcctctggctactgggattcatccatgcacattagaacccagttaggtcactaaccctttgaccatcacagcccagctgtcatatccctccctagactcatctcttccctggccctttcacctccatgctgtatactccagcaagacttagcttcctccagttcctccagcacctttctctcctgccttcttgcctgtgcgcaggcttttccccaactggagcaacttgctctgtctccacctccaggtctcagttgaaacatcacttcttcctggaaagactgctgactcctaggtatttttcccctaatttataccaccgtggccagggcttttctgctatgacggcacccagcacttggttggggttacttgtttgaattgttgggattccttttactggccagactggaggaggacagagagcacgtccatctgactcaccacagtccagggctaagcagggttgccggtacatggcaggcactcagtagacaatggctgagtgagttatgtcaataatgggaccgtgcttaaatgtggacatttctgggggctcagggaataggtcattctgtgggccagacaaagcatgcaagtgagcagagctggcccttcgcctacaaaataccgaagaatattcttcaatatcacaagaaagtatcttttccatcatttttcttgaaaaatgcatccctcctgatctatctttcatttcctcacatttaatagagatgtgaatacagagaactatatctctactataagacaaatagcaccctacgcacagtaatgacagcccaagtagtctacttgtaggaacaatgaaaggaagtgatgggggctggggtgaatggaggtgcaccgagcctgtctaaagaggctgctgcttctcaacctcagcctggtattgcccaaggaaatgtgaaccagtgcagccagatttcctgacttcaagaggagctggaaatcgactgtatgcgtaatgtcccaatttttaagagctgcctcaattgaacacgcacaggcacaaacaaaaacaaaataaacaagccaaatgcaacatctgctgagaggttttggttcttggattgcaacctctgcacacattttcccactaaataaagaaaagctccttgcagatggaccccggtgggacctccaatacccggaatgcaccgaatggctgggatttgtgtggccccaaaaccctcccttcttgcgctcacagtgctttcttgaagcttcagcaaaccccagcgccaaaggaaaaatatttataacctgactaggcagcgcttaaaagatcaaggcatacgtggtgtgcagaaatcactcgcacattgttcctgtttcctctctgccataggatcaaatgcttccagtttcaatgattaatcgcctctcagttttcaccacaagttgtacaatgttattgactgaaacagaaatattcatttcaggactctgctgctggaacaaacacaagctctggggcggggctgatgatgactgatggcacaggttgctgcacatgtttctgtgctatcggattcaaaccacccctgagactgctctctttacagatgggactcagggaagctcaaacaactatccaacaacaatcatttagtgtgactttattaatggccactatccatggaatgtttactctattccggatacggtgccaggaacattacctataccatctcatttaagcctcataacacccactgttatatttgggaaggagccttggcagtaacattttatacttgaaataactgaggcagagaagcccaaggctgctaagcagcagagcagaggggccagtccccagcccagagctcccacctcggctctggcattgctctcctatgcaagaccctgacacagacacacacagtcttttccaagctggctgggcaaggaacaatttcttttgcagaaactcgagttactacaaggcttctgtggacagtctagggtaatattggtactttaattatgcacctggtgtgttatctatccttgggagttgggaaaggtgatgctctggcggtctggggaaatctgccctctgaaattcgagcactcttgaatctcttgcctggggcccaattgagcatggttgctctccaggaatgtcccagggcagtgcctctctaactcaaatcctgggagatattctccagcgtctatgaattctccaggtaacctctttacaaaatttaaaatttttcatcaaataataatcatgtaaacatcaatttactattttaggttgtctgttttaatcaccttataaccatctatgttgggggtccacaaactacagcctgtgaactaaatcagcttccaacctgttattctaaggtctactactgaagaatggcttcatggtcttaacccattgagaaaaaaaaaatcaaaagaaaaataatatttcatgacacttgaaaagtatatgaagtttaaatttcagtgtccataaataaagttgtattgagacagcagttctcattcatctgtagctgcctttgcaaaaaagacagtggagttgagtcattggaacagagaccttatggcccatagagccataaatatttactatatgggccaagacagaaagttggacaattcctgacctatgcaatgtgatgttagtggcttatgtttgtgcttccagctgagttgggtactctgtctgttgtggttttgttcaagttcttggattgcaacctctgcataaattttcctgctaaatagagaaaaactccttgcagagggacccaagtgggacccccgatacccagaatgcaccaaatagctgggttttttacttttattgccatagggctaatgagaaaaataaaaatagaggaggactcaggcacttagaacatttgcagctacagaaagcagtaagtcctcacattattgtctacaggttctttgatattgcaactttattaagtgaaaagacatataaagaaaccaatttgaccagaagctaattgaaagaaatgagttaagttccttgggcatatttctgggcacaaaaacatcaccaaacttctaaataaagacccaaaacacttgtaacactaagcattaaaataaatatgagctatacatgcatttaagaaagattaagcaaaacaagtcagataattatttacccaagtttggtgaattagcgagtgccagcagtcatagtggtggtctgttggatcaaggaataaatgtttgaaagcaaaagttgtcaggagcacctcctcctaccacacagttcaaaaacaattacagatatggcaggctcgccaagcacttccataccacatggtttattgccttgcatttgtacgattatcttctgctttacaaatttttattttacaattacttttattcattgactgattcattttccaatccacttattccagttcagggtcacaggtggttggagcccatcccagcagctcagggtgccaggaaggaacccaccctggccaggacgccatcccatggcagggcacactcacacacacctacatactcacactgggaccacaccagttcacttcacatgcacagctctgggacgtgggaggaaactggagtccctggagaacacccgtgcagacatgggggaaacgtgccgattccacacagacagtggctctgccagggtttgttgtttgtttgtttgtttttcatcaatgttatatgaagcaacagtattcgaagacctgctgtacagctttccagcagttccaggaaaaaagagccctgggagacttaagccatcacagtacaaggcagtagaggcagggtgaaatagaatggaaaaaaaaaatgtgaacccacactgcagtcatactggaagcagcaatcccatttcaaccaaacaacctcacattaaactaatgttgttaatttgaagtttattggttttgcagtcgtatttgtgtttaatttggaaatttgtttcagttttatagctgaataagagctaaaaagcataaggattttatacctaagttttatgtctgtacatattaagtaacattatggtaaagtcaacacttactgaaaatgtcccctttaatagggcatatgttacttaagtttaagcaggaaaaatgggtttaagaaataccaattgtattatatctttaaatatgtgtgagctgttcaaagttgccacctggcagaaaattcaatctcagttacatagggaagttcctacccctttctaggaaagggtcttgttaaataagaattctaagcttaagttggagacaggttcttgggttggggcagtgatcattttttaatcttgcttgtatgcctacactgcttttgtgtgtgctgatctgtccatcctttaggctgtgctctgcagaatggctcaaaatcacccctcacttagtcctcccacttgcttcctttgtaccccctcagcccactttgcttcttcctctttcctggacaaagggagcacagttgttctcaacgggcctttagaagcaaaattctggcttgactttccaatgtgggagtgggagaggactgctaaaaataattggtctttcttcttagcaattcaccttattacaactgttaggtggaaaacttttttttcgttttactgaaaagtttaacccaggcactgaagagttagattgtatggacctcttttaatcatctgctgagttctccaatgtatcagttagctattgctgtgtaacaaatcaccccaaacgcaatgctctacaacaataaaaatcatttattctgctcactgcctgcagtttattcaggcattggatgagacagcttcttcctgctccatgtggagtcagctgggtacttgaactgggacatggatgatctactttcaagatggcttattctcagggctgccaaatggataccggctatcagttgaaagctataagcaggggcactctgcataagcatggctcatctctacaaaagctcctccccagtctccttgtttgggcctcacagtgtatggtaacctcagggcagtcagaatgtgacaactaaagacttcaggagtaagtattccaggaagcaagatataagctatgtggccttctaagacctagcctcagaggtcacatagtgtaacctctatcacaccctattggtagatattgtaacagaagcccacccagtttcacagatggggacatagactccatttcttaataggtaactggccagagttgtaaaagagcatgtgggatggaagatattgttgcaagcatctttagcaaatacaactggacatacccaatgcaagcacaggattgatcctccactctgcccccataccccatgatttattagccactcggacaagtgacttcaactctccaagcctctgtctcctccactaaagtggggacaaatgagtattacaaatgagaccattaaataagataatacattttaaaaattaacctggtacctgtcacaaagtacatgcctaacaaatgtttgcttctgtctcacttcctcaatttcatctcagtcaacctggactgactcaaaatggcattcttcttggctgccccctttgaagtatttctgctgagaaaatagtttctgtgtatttgtaaatttacaggttgaacatagatcattattcaagcattgctggtcgattcgtcttttcaaaggcgggagctgctggctgtgggaagggacccagcaggggtctcttgcaaccctgctctatgggtgggggaaatctggacctccctctggtggggttgattgaagtgaagggtcaccatatgtctttcccaagagggtgactgacttcctgctttggtcccagtttccctgagattttcctgaaagcccttccggctagcccagttgggagtgttagtacatcagatcccatgctttggtgaaaaatgtaaacacagacctgatttttcattttaaatgaagccaagcatattgctcccagcagatgccgagtgactcaatctgtcctctcggttctgaagggaactgaagaacaacatggtaaaataaagcaaacagcacatttattggttgataaaatgctgttttagtctaccctggcattatatggtgattgctatgtggcgaacatctgttattaaatccagacttctgttgcctggatacattgagtcaaaagctggagcggatgagaaatccatttatgcgtctgttgcgtgtgaatgtcagagctcatatgatgcctttgtcttcattctaactgaatcttttaatatggaccgtctcacttgttaattctgactcaggggcaataatgttttcatttgattaaaaaaggttaaagaaacaaagaaacagtgttttctcaggtgctctaagtaattctgttaatgaattttcggagacagcgtgtgaatttgaaaagagtaggactttttaaagagttcatactatgaacccaataattcagatcctagggccttatcctaaggacataatagaaatgagcacatttataagaacaaagatgttcaatgaagtgttacttacaacagcaaaaaaacttgaaagtcacctaaatgtttgtaagtcaagagcttcattgatattgactgcaaagtccatgttattccatgtgacgaattttttaatcaatcacctcttgatggattttaaattttttacaattttttgctatcctaaaaaaaatgtgtcaatgaacaactttgaactaccctgactaccactttaggatagattgctagacgtggaattactaggacaaagcctatgttataatattcactcagtcaacaaacatgtcttgagtgcccactatgtggtaggcaggctttgctctaaacctcagaggccccgtggcagatgaaaggctctcaccttcacggagacaacagagtgagaaggggggaaagaaaactagaggaatctagtagacagtagcagatgctgaggagactgagaacagtggaaaggctacacacagggatctctgagtgccatggttcagagatcattgaatgaggtgagattcaaagagtctgagaaagtgcctgatagaagaggatggttggctctggagggacagaagtggagggtgggagtgggggaactggccttgcctgagtgtatccaaagagcaaatctttctcactgggctgactgacctcgagaacaggcctatggcccttgtgtttcttcactgccatcagaaagactgtgcacatgaggagatggaagggactctcaaaagagagaggggatcatcagggatgagatccgtggagaatcaccgcagagctggcagcgtttatctaagaatgtggcattgggaaaagtggtgcaggctacattccaggcgataaggaccaagcaatgaaataacaaataagtcatcttaaagttaaaggagatggacaatagacaaacaaatatgtttcaaaacatgataaatgctatggaagaaataaagagggttggagagagggttctacttagatagcctgatcagggagaatctctctgaaaagaggatgttttggctaacatatgaatataacatatgaatattgggaaagagacagtcatgaagagagattgggagcgtaagattccaggcagaaggaatagcaagagggagggccctgaggtgggaacaatcttgatatgcttgagggacagaaagaaagccatgactggagcatagggagttatctggaaaatggcaggagtaagtgtatcagtcagcaattgtcactgtaatgctgtgtaacaaaccatccaaacctcaatggcatagtagaggtagctgagtcaggactagaacccaggcatgattctcttcaaatttttctctttccatccatattcactaccttcctatgtacaatccactttctcttaaagtcacagcagcctcagaatgtattacatacataagaactagtcctacatctagatgtaatggctttcaaacctttatgagcataggaaacacctgttgagctggtttagaatatagcatttagggccttgcctccagatagtctgatttcacagaaacctgcattttaaaaaaatcaccccaaatagttatgatgaaggtgatctatgtacgacacttagagaatcagtgatggaaaattcaccaagaacagccacaggcaggccagaagaatggccctgcccctctacttttaggattaagcagaagctggccctagatctcaccagttaccagtgatcttgggcatttttagcatcatgtgcattgcttcactgtgataccatcttgctggcacagccatggaaagccatgagttaatgcatctccccatgtaacaaacctcccctaggactctggtccacacctatctctgctagattctctggcattgcaagaaattcttcagactgccccaagagattcgttccaatctaggggctccttatccccagctcagagctggatttggctcttgcttggaggcgggaagccctgctgggccagggcttagaggggctcacaagaaatcaaagcaagcattctccgcctctctcctacagccctgcatgcatcttctctgatcccttgcctgagtggggggtggcattccaaaagctcattactggcttacatactttgccttaaatcagctcttaaatgccctgggatgaacagccctaaataggaaagaaaaaaaaaaaacaagtttcttgcaagttcacagatatgcttggtgctttctgtcaggctagggtgtagccttctctgttctaaatttgattttctgagtctttaaggaaaaatggctactggtcccctggacgctgattgcttcagcatctgaatctgctccatcacttctacctccacccactggtccacgtccagtgggtagaggtaaaggggatggagatatcatttatcttcaaaggataaaactgctctgagagatctttgctttcttagaaacactgctggaaagttgtttctttagactacattaacagaagtaccatctctaggaagacaaggtggtaataactaacatcaaatgagcagttcctatgtaccctgtacatgtcttagccaacttcatccttgtaacaaacctggaaggcaggcactgttatcactcttattcccaggtgaaccagttgaggttccaagaagtcttttgtgcaaggtcatgcagagttgaggcccccaagtcggtagacttcaggagccagaccctcaaccccctcactgcctcccgcctcatgctgcactgagcagaccatacccggatggtcatgttcaggttggctatcaatgcagaccacgctgggcatattcaggggacggatactcagaactatataacataaggaatagaggaaggactggaggatgtattaacatgaagaaaaggtagactcatggcaggagatgagcagggtaaagaggtgcaagacataaaaagccaatttcatatacatgaagatttatcaagagccagaaggccctctatgggtccaagagttacaaggcctaatgaggtgaattaatgccagcatataaggaaaagcttttgaatactcagaagtgtccaaaaaggggtcaggctgccttggaaagtagtaagctctccatcagaggcttggcaacttcttattagggatggtatgagtatctcaagtacagatacagatgacccaaataaccactgaggcacttctgaccccaagtataagagattctattgtaacgcacaggagtccatctcaagcagcacactgagccatctccttgataaacctaaaggtaggtattattcctcccagatgctgtcttcttagcctgggatgcaaaagccataggatcacttcacgtccaacccccatcaggtgatctgtcatgaatcacaagttattggagccagatggaactacagagctaaaagatacatgaagacaccgaggcctgcagacagggactaactttccaaggtcacagagctaacaagtgtcagagtcaggctagacccaggactcacaagttgagctcacaattagttccacttcctacaccacctggatcatgagtgtcaagaatgaaggacctttggcagtcttctcatccagcagtgacaaacaggatgcacttcatgtgccagcttttaattcattggtcatggtttcctgaagtgctgttgtccagaaatattctgaggccatatctggatccagtggacatgagtgaatcatttatgatgtctgctttggacacaggtggggaagtgacaacctgtgtaccaagggtttggcagccttgagctaatccatcttaatgactttctgcacatgctgcctggaagtgatattaatattgcaaaagagattataatgtgtgataacgttgtagtacctcacttattaaaataattcaaggatccatctttgatggttaaacccactgtctatgtctgtttgtgttcctacaaaggagaacccaaggctgagtaatttgtaaagaagaggtttatttggctcacagttctacagactgtcaagaagcatggatccagtgtctgcatctggtgtggacctcaggctgcttccattcatggcagaaagtgaagaggagctggatgtgcagagatcacatggcaagaaaggaagcaagggagagggggagatgccaggctcttttaaacaaccagctcttgggggaactctcttaggactaatagagtgagaactcacttcttacctggacaatggcaccaaaccatttatggagaatccacccctgtgacccaaacacctcccatgaggccccacccccaacactgaggatcaaatttcaacagatgagatgaggaggatcaaatatccaaactatagcacccacctaacgaatgcaaaagatgtgcagtgaccttaagccccaacaatatagagcagatgacagttgatatgtagatagtttgaatgacagtttaaggtagcaggttggcaggtggctccaccatatacttgttgagtagtcctgagcaggtgtttctctgagatcctttggctggtctgtaaaatgagagataatgactctctcacaaggttgccatgagaaatagagaaaataccaagtactcagcatagcctaacatttagcagttgctcaataaatgataggaagtattggctttataatattgcatctacccccttctctctatgttagaacctttccaggcatttaaaaggtgagcagcaaaggccacccataaatgtgctgctagagagcacataggtcaccaatctcagactattggtctgaggcagatttttggagtctcttattcccgaagagatccagggacctgctttgcaggtgactgagaagaccaaggccaggagggaaggccaaaaagctccaagcagatcacttatctgtataacacttttcaccttccagtccttcttcatggagtttcccaaagtacacacccacagtcctacaaattggggaagagccagaggcaataaatgtgtgggagcagtcagctgagaactggatgttgaaggattgtacattttcttgaattacatgggagcaaactgcctcctgagcctgctgtacccaaatttatcaaagcacaaagcatttttaaagaccatttaataaactgattaaatgtatttgacaacggagctagaaagccagtcaattcatgtcttcatcactcctgagaagttgcctacacgataaaaatggaagttctctgaatctgtgggtgggagggctttcactctcctaatggaggagggaaaaccagggcatgctgggaggccgtcccagcccatcttcctgacatcgctgcttttcctgtactgtgctaagtgcagagaaggtccagcgccctgcctgtttttcacttgcattcttgtctccagactttctttctctccccacccttctcatgaccactagcatctaagtttatcgcttcctctctgttacctctgtatcctccaagtacatgatatacctctacagctcatctgccaatgctgcaaagtttacttatttataaccttcccagtgccttgtgtatattagatgcaggagtaagatgttgtgatcgagatcgtggtggtgatgatgatgatggggagggagaggaagaggagggggagaagattaggcaagaatgtaaaagccctcatgggtcttggaaatcacagcatctaagttctctccttcctctcccctccttcccctggtttagagatgctttagctagcctaagggcagaatagcctgcctcttcatttgttcttcaaaatccattgtttggggcacaaaatgatcttcagagtttaggctcttgaggctcaataaacttaaaatcttttctcagctttcctgttagatcacccacccccgaggcaatgaatgctgctgagctgatggaaaaagggcggtgagaaactccagaaatattttccggcagtgtttcttctttatctctgtcccccagtagctcagtgaggtaaagataatcatcagtttttaattttttatgttattattgtggctgcataacagttgtacatatttatggggttcatgtgatactttgataccagcatgtaatgtgtaatgatcacatcaggtcgttattttaacactgaggatatggatgctcagaatggacattggcctcactgaggtaatgcaggggtaaatggaggcactggatggggctggaacccccatctgtctgactcaactacctgaagatggaatatgggttgtgctaactaaattaatgagtagaggctgcctgaggcgctgccttgagaacagttctgaggctgcatctgaacttggtgagaaaagaagtgctgtgatctattagtaatgtctgccatgggcactggacctgggagcagccacgggagccatgccatgatccccagactccgtgcttcttagaaattctgattgttgtttgttcaatagataaatgaatgcagaaactgcttccttaatgtaggcttagagaaggggattggagtaggaagcaagagaggcagctcctgggcctgttcatggtgtgtcgggaggccaggctggacagtaagagataagaacggcaggggagattgagaccagaacttggaaaagcttacaatgccaaactaggaagcctgagggtcgtgaaaggtttgggctcagaggaataagtaagaaaagctgcatttaacaccaggaatctggcagggacacgtagagtcaaggagacagaaagaccagcttggagagtggttgagtctgcacgaggcgtggaggggtgcccagcccccggcagaggcaggtcacagtgacaaggacagaaagcctggagggacaactccggggacttagtggctggcagaggggactcttttccccagtgactcatatgctcctttttttctagctgaatttcagttttattttcagctccaatcagtggcaatagaggaatccgtgtgctttatttctcctgctccacattcctccccacagtctcccagaggctaacattctcccatcctccaaagagaagaaatccacagcccagagcagagcaggcctggtggcttcatgacagtcatcagtgtggccccatctactagtgctctccaagtccagcaatgtgttaaccctttacaggcattatcccatgtaacccctaacagccctaggaagtagacactactagtacctataattcacaggtaagaaaactgaggttcagaaaggcaaagtaactggttgagggtcacacagctaagaagtcgcaaagccagagtcgaaaatattcaaaaccaaaaagaaaaaaaagaaaaaaaaatctgagttgaaagcttgctctcttaacgatatagctctggcccaattaagctataaaatgtcacaggtagcagtgtccttagagaacacctaagctgagaactccctcatttttcagagggggggatctgagggtcagtgaggagatctgttttgtccagggtcatcagtgagttaggggatgagccgggacttgaaccctacagtggaagaaatgtgagccacagaacttaccatgttgcttgttgacttcctctggcacattccactgtattttccccgaagcctctccccagcctctcagccccactcctcgtggctccactccctattactcagaggtgttcagctccacccactagtctcccagcatggcagtttctgcccattacaggcctacaatacctgcgagcctgtcagccccctgcctcccacctctcaccccccgccccggaaatggttctgttgttaccggaccaatcagggcacccagcagcgtctagaacttggggctgataatggcatcgtgaatagaggaaattagagctgaatgcattcacagtgaatattcctcccagggcagacggggccattcgctgagtggcacatgacagatgttcacatggaacccagtcgcagggccaccttcactcctttcaccagcacggctgtctcccagccctggccgtgctttagagcactctgcatccccaaccctggccctccaagccctgcaggagccagtggttctgcatgtctcctctagtacctctcaagcacatggccttggccctgaagagcgtagtggttgatcgcacagcctttggggttagatgtatctgcttccaagtcccaaccttctgcctcactgctgggcaggccgggcaacatgcctgaatctcagtgcccccatctgtaaaatggggataattaatacccaccccacagtggtcatgtgaattcaatgtgattatgagtgtaaagagtttgtccccatgcctggtatacagcaggtgttcaataaacgatggctattatgatcatcgattgctctctgtcacctgtgtatcctccaaatgcatgactggcctctgcaattcatctgcctcaaagtttacttctttgtaaccttcccagtaccttgcatatattaggtgcaggattaaggtgttgtgattgagatgatggtgacgatgatgatgaagatgctgatggggatgcagaggagggggagaagattaggcaagaatgtaaaagccctcatgggtcttagaaatcacaagagggcaatttgttgcagcagaaattgaattacctttggagttatacagatgtgctgaaatttactgtcagcaacaggaaactcacacaccctgccgggtccatgccacattgttctgtgtggctggggaaagttacctcatctctctgagtctgggtctcagtccctcatcttctccagggctgttgttaggagtgaatgaagccatgctcacaaagtgcttagcacagtacttggcctagtgggtgttcgattcacagtggatattgctgttgctactcttgtcagtatatttctgatctccccaacttacagatcaccactccccttgagagcagagttgtacacttcattgtgtgtgcttctggagggcagggatggaacatccattcatttagtcaacaactgtggattgagcagtgtctctatgcctgccactgtgctcagctctgaccacacagcagtgaacagaatagatgagctctctctgtcctcatggagctcacagcccagtggggaagacagatatataggcaacaagtttttaattgcaagtaaaggtgccagccccaaaaaacaccaagtcacaggatacagaacaatgtgggatggaccgggcagggtgtatgagtttcctgttgctgctgtaacaaattatcacaaattcagtggcttaaaactaataaaaatgggccgggtgcagtggctcatgcctgtaatcccagcactttgagaggccaaggtaggcagatcacctgaggtcaggagttcaagactagcctggccaacatggtgaaaccctgtctctacaaaaatagaaaaattagccgggtgtgactgcaggcacctatagtcctagctactccaagaggctgaggtgggagaatggcttcaaaccatgaggtggaggttgcagtgagccgagattgtgccattgcactccagcctgggcaacagagcgagactctgtctcaaaaaaaaaaaaaaaaaaaaaaaaagctaatataaatgtattatcttgcagttctggaggtcagaagtccaaaatgagtcttatgggactcaaatcaaggtgttgtagtgctgtgttccttccgggggctccaggggaaagtgtttccttgcctgttacagcttctggaggccactcacattccttgtctcacggccccttcctccatgtcctaagcacatccctccaatctctgcttctgtcatcacatggccttcctctgaccctgagcctctgcctccttctgagaaagacccttgtgattacatcaggttcacctggataattcaggataatctcttcatctcaaaatccttaagttgatcacatctgcaaaatctctcttaccatgtaaggtaacatattcacagcttctggggattaggacatgcatccctagggaaccatgattcaacctagcatgggggaacccactacaggcaggtgttgtccttgccatcgccagctcagtgcttggcacagtagaggccatggatattcattcagagagagcatgcactgaggcaagcctgacctcaagatcaagacaggaaattggctttcatgggttaaggacctgttactttgctcatcaatgtatccttaatcatcagaggtcagatctgctggagagtgcaatctttcagtttccaaaagtaagactggatgccttagaacttaaagtcagggaggtacccaagaaagcaatcatagactgagtccccatgcagtgcactttctcggatggacaatttctctgttctgacagtcactgttgactccatttctcagatgagggaccgaggcacagagaggtgcagtcagtcacctgaggccacacagtcaggaagtggaaatccatggaaactcatcatcagctgcctcgcatcagggccagtgctctttatctccaccccacacattataaagccactcagctttacactcaagggaacttcctatttccctactggattatatgtataatttgtagtattgcaagatttgaacagaagcgagcagcagcttgtagttgtgtgtgtcactcactcctgcctgtggggatgccacgtgattgtttaaagggttggaatcaggagaaaggcaggctcagagcaggaccaagagagagcccacccctcgcctccccaaatccttcagcttcctgaagtgtggctgctgggtagcagctcccccagggaagaaaatataagatattcccaagggaccctggaagctttatcccaaggcttcacatgtgtaggctgtttcctgtgattcggtctggctgtcaatgatctaagattgagagccaaggtcagtgaggggggaaaagggacatgtagtgcaggggttcagcatccaggcctaggacttagactgaggctctttaccctcctctgtttcttgctgatggccttaggcaagtcgcttcccctctctgaccctcagtttttccctctgatgaaatgggtgtaataattgtgcctacctcttcagggttgctgtgggataaaatgagctcatacttacttcttttttttttttttttttttgagacagagtctcgctctgtagcccaggctggagtgcagtggcgcgatctcggctcactgcaagctccacctcctgggttcacaccattctcctgcctcagcctcccaagtagctgggactacaggtgctgccaccatacctggctaactttttttgtatttttagtagagacggggtttcaccatgttagccagtatggtctcgatctcctgacctcttgatccacccgcctcggcctcccaaagtgctgggattacaggcgtgaggcaccgcacccagccagcgagctcatactttcatgttagcattagcatagttcctgacaataagaaccaaatacgtggtatctgctattttctgttttaattaggtattcagagtctatgttaaattaattaacatatatacttatggaacacctactcagtgccaggtattgttgtagatgccaggagtacagcagggaataaaacaacatccctgtcctcgacacaaacacacaagtaaatagagaaggtcagagataaatgctgtgcaggaaaacaaagcaaagtgagggatggagagtgcggaaggttggggcacttttgtttcagatgagtgtcagggaagcccccttggaggaggcactgtaagggcacagactcgaatgaaaggagtatgtgaaggtgcttaaattgtttctgtttggtttggtgtggtgtgatgtggtgtggtgtggtgtggtgtggtgtggtgtggtgtggtgtggtgtggtgtggtgtgatgtgatgtggtgtgcggtgcggtgcggtgcggtgtggtgtggtatgggttgaggctggccttaggagcctgttggccttccaggccagtcctgaagcccagcccagagcaccagactctgcagtcagtcagtggagggcccacatctcagccaatgcatggctttgggtggtgacttcatctcccctagtgttcctttccccctctgcaaaatgggaatggggatggctcagaactcccagcgggagttaggaggaataatgtataggaagtatgagcagagtgcctggcctggagcatagcgcatggccgatcataggtaagtgctggtgttgattttattggacacaagtttggaaactcagagcctgcagggatggccttgaaggtaaagaagaggtagttgggagttttacacttcccaggacctaccctcagagagacaggggtcattccagagtatctggatacccagtttgggccaaagatacttccagccagggcactcgtcaaccaccttgatatttgcccaacacagctcctctgaggagagcttgaggtctgggggccccatgctgctgattaaactgatggctgggaggcaggtaaagcaagagtggagaagtgagtctggaggtggaaatgagatctccaaggaggggatggctgactgaggctgacacgtttctatccaaccggtagaggatttgcagttggactctgctttatggcttggtgatggtcagtgttggggcaggcactaggtcagagggtgatgggaggggtgagggaggttccagtctcacgctaggctgcctgcaccttcagcctcagctacctcaccacctaactggggaggattaactataactctgaccattcctgggactgtctccatttcaaacaatcagatcccctgccagactgtattagtcagagcagtgcaaatgctgtaacaaacagccccaagtgtctgtggctgaaaccatgacagtttacttctcgttgccatggcagccagtgcagctcagagtggatgggcatgtctgcatctgcatgcatgcaggctccttccatcctgaagctccccatcctcgcccttacactgctggctgggaaagggagcctggaggaagcctcaggtttgtatggggcaggcctggaagtgaggtgcaccacctccactcctatcccctgggccagaacttgggcatctgaccacacagacttcccttggaaggagaagagaacaaggacactgtgcacctttgtcaagccaaccaccatgcccatggagcatctactatgtgcagagatgtcagctcctccagacaatgttctctgtcattttccatctgttcaagctgagtcagaggtgtgtacatgtgcaaatgcgaacaatccaggctcacttcctgcttccctgagtcctaggctaacctctagcacagcacagatcacaagagtgatgactgcctgaccgtgtgtccttcctcccagtagagtttgagccacatggaggcaggggccacagcctgtattctcaggacttggacagcggtggaagctctacttagcttgctgaagaggaaaggggaaagaaaggagagtgaattggcacttgtcgagatctcccagttcgttttttaaaaattgtggtaaaatatatgtaacagaaaatttaccatcttaaccattttggagtgcgcagttcagtaccaccaagtaccttcacgttgttggacaaacttcaccaccatctgtctctagaatgttcttcatcttgcaaaaccaaaactctgtacccattaaacgactccccattccctcttcccccagctcctagcaactaccattctattttctatctctacaaatttgactactctaggtacctcgtataattggaatcaacagtatttgtaccctggcttatttcatttagcataatgtcctcagactttattcatgttgttgcatgtgtcagaatttccttcctttgtaaagctgaataatttttcattataagtatataccacactttgtttatccattcacttgtcgatggaaatttgggttgcatccacctttttttgctattgtgcataatgctgctatacacatggctgtgcaaatatctaatattagtccctgctttcagttcttttggatatgtatccagaagcagaattcttggatcatatggtaatcctatttttaattcttttaggaactgccatattgttttccacagcagctgcagcattttacattcctaccagcagtgcacaagagttccaatttctccatatcctcaccaacacttgttattttctgttgctgctgtttgtttttttattaatagtcatcctaatgggtgtgaagttgtttctcattgtggtttgctttgcaggttttgatttgtagattttcctgatgattagtgatgggtgcatcttttcatgttcttactgaccttttatatatctttcttggagaaatgtctgttaactctactcatacttttgtaaatagtattcccaatccttctaactccccaatgaggtggatattagtatgttcgtgttacagtaaagccaactaaaccttagaaagactaggttaattatccaaggtcacacagctagaaaatgacacagcttgtattgaaacatcagtttttctctttccaaacctaacgcacatttcatgaaacctacattattgcaccataacatcatgttgatttacttatctgctctcctgcctgtcccatctactacataaattgagtgtggtttgaaatcagagactacttctcatctttggcacagtggcagccatggatcagaatctcttacatgctggataagtggatgcaagctcaaggccacacctaaagtccccaggtgacttgatcacttgagttagctgctggaaacctgggcttcctcttctgcaaaatggggagagaaaataaattctcagtggattgtttagaagatttgagcaaagacctctgcaaagtgctaagcatgtggctagcatgtggcaggtgctgcctaaatagtagaaattaacactgccatgcttataagctccggacaaacacaagaagcccgaaacataatctgtgccttctgcttgcattcctcctagttggggatgtaaaatagcccagctacaatcaaagaagaaaatcaaagtcagcacagactatggatatgcttctatatgtgtagattatttccagactcattcggaagaatctggacatactggttgcctcagaggtcaagaaaattggctcatttacttctgtaacttaatttcgactctctatgcttttacatagttggaatttgccatgcacatatactacatttaaaagagcgtgtacgcgagaataatgtggtcaggtggcctgatccacaggtgggtgggagagacaacagagacagtcttctgaccccatctggcttctacctgccaaccccatgtattctggagactctccacacctcctggcatgaagcagaatccctctcagggggtcacctcacctccttccagaaatgtttaacagaaagaacctaccattggctttctccatccccagcacctaatagagatatcacggagaggggagcatttgtaatttactttggaggggtgtgtggaggccgagtaacaccgccttccatctcagtgacaacaaactcattcttcactataattaaaatgtcactttgataaataattccatcagcccccttccacctatgaatagcttcttgctataattgttcacattctgctgaattagaagtattcaagggagaatttaagaggtatttaggcaacaaagataaatcgggtgtgttttccaccctcccacaatccctcattaagcgagacatcatccccggctgggcagggcggggctggggggcctcatccctgtgttctcagtcactctctccctgagtggagggagccggaggggttgccacagcagcgtggacctcaggaaggggctggagtttggggatacatgtttgggggccttcccttcccagctattactgtagaaaaagaagaggatgcctgaggtggtgggaagaacgtaggctctagcttcaggtgagcttggaaaagtcagtgaacatttatggacctctgttgtataacagaatacaagatataattcttcattcaatcttgtgtcaagagcttgagtcaagatataattcttggaagagacatctgacattgagggtcccccctcccatgttatgggactcaagtcttccaaaggatgactttccctaggagacacagctagagattggcaaccccaggacctttgaatattcaacaatacccagtagggtatgaagcaccgtaggagttccgtgactattcccatcttccctcatttttgttggtacctcttccttcctgataaatcacatctgctgggaataatccaataataggatgcacagagccagccacagtgtgttggacacctcaggaagtgtcccatcttgggtatgtctgtcctcaccttgggtagaaagagatggtatttgactctttccccaccagaagaggggtatggccatgtggttacaagagcagcacttcatagtatgaaagccagggttccaagacaactactcccagtgtggggctggcatgttagtgactctaactacagtttctttttttttattattgtttgagacagagtctcgctctgccacccaggctggagtgcagtggcacagtctcggctcactgcaacatccgcctcccaggttcaagcaattctcctgcctcagcctcctgagtagctgggattacagctgcccaccaccacacccaactagtttttgtatttttagtagagatgggttttcaccatgttggccaggctgctcttgatctcctgacctcaggtgatccaccccactctgcctcccaaagtgctgggattacaggcatgagccactgcacccagcctaactacagtttctttatctgtaaattggaaataacaatagtcccactgatgagttatggaaagtagggccttccacggtgtctgcatgtggcaaacattacccatagctcctgttgggtttctcgtgaggagtgtaacagtttggccatgcagttttaaatgccacatgagcggctaggtgggagggagtaccgggccaatccaactcagtcaacacaggtcccccacaccatttcctctgtggcaggtataagagtcaaggcccacttcaaggccaccaaagtccaagcatctccccagtcctagcttccccagagagtcctgaatgacaggtattcattggttgtgatggggcttgtctggggttggggactgggggtgaggagtggggtggggtttaaaaatggagggcagcggtaccagtgaaggggaagcagtgataaaacccatttgagtttctgctctgaagcagagtccattaggatgacggctccttggaccagggagctgcgtctgaggggctgtgcccagttccatcagtggtgggattgggagtggtccatgaaaataactcacatgcatgtgtggctggctgaagaagcagagaagcctgcatgggcagccaatccccatgctgagcgctttgcttggaatggctctgataaagaagcccatgatgctggaaggaagggctccctgcaggaccctctgggatgattccctgcccatctccaggaccaccctccagaatatggtctaggatggccttgagtgcgtaggtttcagaatgtgggaagaaggggcaaggagaaaaaaacaagcacctattgatcacctgtgttagctcattcaatctttctaacatctctgcaggttaaatattctatcccattttacagagggcaagctaaaactgagagatctaagatgattttgccaaggttacactgctagcaaatggttagatttgaacccaagactctaactccaaagagccaagctctttacagtggatcagtccatcatctctttacattttacaagtttgtgtcatggttttagacaatatgtttgacatgcaagacgctctgctaaccttaatgaaggtgtgcatgtgagatgcatgtgggagtcagtgtctcgggtggtgagcttcatccagactcatttcaaactagcttgcacagcagagcttccagcaatgcaaatgccaggttactcgaggctccctctaagatgcagggactcaaaaagttgtttctgaagctccagggcctttataacggggcttcgaaagcagcagaaagaaacagcacacaaagtgtttgtttattctcttgtattcaagaaagagccaataattcaaacaactaattctagaagaatagaattcccccagtccccaccttaatacaggcaggctcacctgtccattggtaagtcagcacatttctctgtgaacactgatgccctgtgcccatcacacccatagtatcaactgtcaggacagctgccagatgaaagtgctgtcatcatgggcagctgcctcttggaccaggagctaagggagaaactccttccttagagacccacgccagactgcagtgttgtttgagagacctgagtctctcagggatgtgttctggagatctgcgagcaggactgtatccatgaatcaggactctgtcttaagccacagtagggaagaggaatggcacaatagaggaaacaccaccccacgtagcatggagccatggagagagcatgagtttagaagccaggagcgccagctctgccagctactggccaaaccactgggggccagtgcctcggccatctgtgaacagacactgctggataatgatctcaaagctctcatcctgtctaacaccatccagtttgagacctgcttaatcagtggggttctgggaggccagagctggagctatgatcagggctaaaatgcatacagaaagcacagatgctagaagccaaatggaggttgtccagggggtccccaaccatgggactggaagcagatgtcaaaatcaaggatcagagcttctgggaagcagacacagcaagggaacatgagtagtgtgagctcacgctgagtgagcactggctgtgcaccagtattgaataggtattaactcccttcagctgcacaattatgctgtaggtgagttttaccttgggaaaccaaggcacagaatttaagtaacatattgaagctcatgcagctgctaacagggaaggccagggtctgaacccagctgatccggctccagcatccgagctctgaaccactggtctatcctgcctctgttaggacttggtccaatgtcatcatcctagaaggaacatttaggcccgcacggtgggtggctggttcaatccagtttaaaggccaggagcaggacagtgacttgcagctgcagcaatcctatgactcaaaccaaagcagctgtgacaaataaagggactgactctcattctcccgtgctagggaaggatgagctatcaggccttgttgcaggctgagtcagtcatcccacaaaccacctaagtgaaacctcttcactgagccttatttcctgagcgctctccctttatctgtgcttgcaaagaggcgtctccctccatgccagccaacccacccacccccgcacacacataccacctctggctggaactgacgaccatgggttttagaaatgagataaatctgggagatgaatgtattcatgagcccataaaggggtcatgaatcactggccccaattactgccttcaatcctgacaggatgaattccctcaagcagattctccttgtcagacaacacgggaggcagtgtcatggctgatctagagccacagataacatcattattccataccaggctggtttcggtttcccaagccacctccacttgatttacagctcacttctgatgctggagagagagataaatatatatatatatatatatatatatatatatatatatatatatatgaaagaaagaaagaaaagagagagagagaaagacacaaaggggaagctttcatgccaagtggaaacaagacaaaataaatgcaccgaatccgatttcaaaagctgtttgaaaactctgtccggaattgctggaaagggccccagcatccacaggaaatgtatccctgccaagccctgtgctactgaactctgtggcccccactcctgcctcccggtgacttgtttagaactacttcagatcggaacaaatcacagccaactgcagtcgctgtctctagcccttcaatcactcctaatcagaccgtgtattttagcaacagaatcttccctggctgaggagctcattcatctgccttccaccagctcgacaccctttgaatgggagatgaggggaagccacctgcttctctggcagccaagggaagctgggaggaggcaggaattgccagccctccctctctgatagatcaccagtgggagtccagaccagcaggaaccaggaaaggaggtggcaggtcagagagaaggcactgaaaagggtcatctgagtccatgtttggtgaatgcccaccttgagctggacacctggctgtggtccctggagttggatagcctgggttcaaattctttaactaccattttctggccaacccattctctgtgtgccccggacaaggtacctaccctgtgagtatagaagcaaacccccagaaaaaagcaagtggaaaaagcaaagaaccaggacatgggtggactcgagtcctagagaggctcaggaaacttttatccaaagacacagaggagctggttgcagaggagagcttaaactcacacagagaggggaggcctgggaggtgtcaacaagttatcttctcacttcagaagggccctctcgagaacagggatttcccctgctctgcaagggaccagtggacagaagtcagcagaggccatgtaggggcaggagcttcctgtcatcatagatgccaaagctgaagcaggatactgaatgcaaacaggccctgaggccatctgatgtgctcgttcccatagccccgctgtgtgtgtgtgcgcgtgtgtgtgtgtgtgtgtgtgtgtgtgtgtgtgtgtgtttggtggggtgggaggggaggcagaagaggaagagagggcagagagccaaagactgaggccccggcccataagtaaggcagtttgcagatctcaatatcctgtgcagacccacaggctgccgtggggttgagggctgctggtgtcttaaccagaggcagagactggaaggagcaccagatagaactgactcactcctccttcctctaccacatttcttctctgaaaatttgccattaatcacaggtgacgatggaatcagcaattaacatgagctaaaacaaactactaggcatacagtagcgctcaataagtgctagctattatgattacaatggagggaaaagttgtcaccgcagcacaccgtgcatccctttttggtctggggcctctcatccagacacaggtaagaagactcctcactccccgaggaatcgcgtgcaatgtcatgatggcatctgatttagttttcccacatctcaaatgagatcagggcaactagtcttactcaacccttcagacttacataccctgtgtatcaaggaatgagtctcccatcattggagacaatcaagtagagcctttctggtggaggagaaggaagtagacaagtggagctcagaggtgccctcccaccccgagattccatgatgctcaggactgtggaatgagcacgggagtgtgatggacctaggggtggggaagagcgagaagttcccgtgcaatggacctaggggtggggaagagcgagaagtcagaacactggcagaagaggaagaaaccagacaacctggaagccaagcagatgagtttcacctgcatatcctctcctcttcccccttcctccagcgttgacttatgggaggtatttcagtgaggacaaaagaggacttagtcaaacaagcacttattgaaagaaaatatattctacacagcacttccgtccttttaaagtgattcactccctttccactgcctattctgtttaggagaaaagtggagcttcttagcttggtgcccaaggtcctcatcaatcctaagatgacatttattgagagcacatgatgtgccaggcattgttacaggcaccagctcattcaagccatataaagacaaccctgtggtgtaggttctctcagggtcaccccttcagatgaagaaactgaagcccagaaaggtcaattaacttgctcagggccacacagctagttagtagtagagctgggacctgaactcaggtaactggtccttacgctactgttcttaatcccgtacttaagtcgaccagccctgccctgccttggctccagcctcaccttaagtttctcaccacctggagtttttggccaatgccacacggaatgaccagcatttctctgaacacatcatgctgtatttagcgtccaggctttagcacagctgttccctgtgcctggaattctcttccttttttgtttttttctcacccaaaaccagcttgtcctttaagatccagcttaatgttctcctactcttgggagccttttttggtgcccccaaccccatcaggccacgtagcacctggtagcaccaggtagcaccccatcctctgtgtgcccacgcctacctcctctctacctcacccaccctggacagaccctcacaccacacttctcacattacattgaaactgatgactgccttgtcatcttctccctggagcatgtcattcatggctgtctcctaagggcctagcttggtccctgcattcagtaggcaggtactatttgcaggggcaggacagcaaatggttagagcttaagctctgcatccaaaagggcctggattcagatctccactcagccatgtgttagctgtgcgaccctgggcaagctagcccgctgctcctcacactccacggtcgctgtgaggtgtaatgagatcgcacatataaattgattagtgcagggtctggaatgcagcaagcagatggccaatgaatgtttggcaacactgcacttcagaatcgggctctacctagacagacttcatatcaaattccagctctcccacttaccagctgtgtgaccttgaacaagtcacttagcctctctgagtttaattcctcctctataaaatgggcttcatatttttaaaatggcaaagattctaaagattacaaacacaacacctgcgtcgcttccctctgtgtacagagcagcgttgttgcagtttgcgcgctaaggctgtagactgggctgcagtgccttttaaatacaccagctcctggtttggagctaatgggacacatgccggggacggctgggagtcacagcggtgtagaggagaatatggcttcaagaaaatgacatttggaagtaattatgggagcaatggatcggaaccacagtcagctgccagctatccccagagacatcacaggagaaggaggcagaagctggaacatcatccgggagctggactagaacgtcccgggaaacttcagcctggcttctgctttgtcccgaaaacccagggctccagctccagggctctgtcttagaatgaggcagtttatctgttcagggcttctcttagtttttaatcccaataggacacatgttgtattaaaaagccatgcgagacggaagaaggaaattgaatgaaatttgagggcaggtaggagcagagacaataaataattcagcagtgaaggaagcagaaaaaagattgcactcatttcgcccttcaacaattatactaaacacctgctctgggccacagaagggccagatcccattcctgtgctcaggaagcccacaggccggcagggagaggctggttggaatgtgtgctttgcactgtaacggaggcatcgagcatggtaagggactggcggtggctgctgcctgcggacgtcgagcaggggcctttgaagaggcaggacctgtctggagtcttacctgggccttggccctggcaatggggaatggagcaggcagcaggggacagatgctgccagaaaccgagatggtgccggaggactgggctgagtctgggtcaaatgacaccgccccaggctctctgccctctggggtgaggcaggaggctgcctctgtgtgtgattcagagaccctagaatcccagtggccatcaccccacagcacatgccaacctttctgtgataactttctcttgtggaactgtgaaagtgtaagaccagctcctgtatagtgcatggccatcctttgctttggggacagtaagtcagtcaacacatacttataaatggggtcctgggccgtggcactgatctggtcctcccaccttgcctcacactgcccttcccactcaccacttccctcctctgcatcttagccgcaagggactttcagaccaagcagacctggaatcaaatcccaccgctgggcctcaatgccagtggagacaggaacagctgatccctggagccctcaggaggaagaggacgggatgcctggcttggctgctggtctggggcaggtgcccagttacagcagttggaaaaatcctcagtgttggaaggaaatttggaagtgagcatctacctgcctgccgtgcagtttgtgacttttaagatggttgacagaacattcccaaaggaccacagcggtgaccactgttctcgtttccctttggtggctcactcactcagtgctggacacagtggtcctgacaagacagtgctgtggcttccatgaacctaggacagggatagactcaaggactaagaacaaaccaggaagaagcatcaccacaggctccttgccagtcacctcatctcaccctcctggccctggcggatgggtctccatatttacaggggccagatgaaaaaaccagaggagccaggaaaaggagcttccccttcccaagggcgcaaggtgaggtgccagtcatgagatgcaagccctgagctttctgattccactgcatgtggtcccaaggttcggcgccgcatcacacagttagtgagcacactctcctcccctggccccgagtgagccagctggatggcagatcagaaagagaagtcccgggtgcccccaacatggctagctccttccaggaccaggggctaggccccagctaaggctggtgcacacagcagggcagggggcgaaggagtgggatcccacccagggatcccacccaccccaaacctgctttcggacatctttccaatgcataatgtgcagatgaggccctttgataaggaccaaatccctttccgttgcttggcaacctggctcacaagtcatagcagggaagtaatttacaggaattcaaagtgtcgctggaggttctgctgagctgaattgctgcaaagaggaacctcaatggtccaaatcacacctctggcggggaggaggggctgaaggaaaagcttccacttccgtcacttgagagtacagagccctgagctcagactcagcgatcgttttccattaacggatttactggttccatgttgagctcctgctgtgtggcaggccctgtgctgggagccagggacacagtgacaaacgagacagatgccaaccccggatgcacagagctcaaagagacagaggagtaaacagggctacacatgtgacaagataggctgtgcacaggggtctgagcaggacccttggggcaggaggaggcagtggagggatgggagggtagggacgcagtggtgaccagctagccagatagagaacagagggtgtcccagcacagggccacacaagcaaaggcagaggtggggagagaagagcctgccacactctcagatcaccatgtggttgggccagggccccagctgaggctgaggacacatggagcccagatccggcagggccttgaatgccaagtcagaaagcatctgaaatttagtctacagatgatgtgggttattgacagccaggacagggaatgacatttgtgtttcaggaaaaccactgtcttcactgttagggggtagattcagggagaaacaggaggtggaggggaagaaactgtgagtaaaggagtctctggggtacaggtgaagtttctgtgaaactggagaagaaaactgttgaggcaagagttgacaaaacttgaagtaggatggagaggaagggacaagttcccctggcatggtgacggcccggtggtgggaaccagggaagaggaggggctttgcaggtgtctgacttgcccaacaggtggcgccatttaccaagatgggaagggccggggagaagggagggttccattctagggaaatctcaggtcctcgctattaggattctttcggttgccagtgactgaaacccagctgaaatggacttgggaacatactggttcatgacatctggtggaggtgaggtcagggtgcactggagccctggcagcccactctgatgccagagcccatggggacagcggtgtatgttggacacagtagtccttcaagggcggggatcggaggaacagaagaaaggaacagcagatgccccactgaggctgagcagaacatttaggatccttggccccatctcattgtgccctttgctgtggctcatctcacacttgcagggagaagccaatggatctctgtgaatggcgaggctttgtatgcataaatgtgggccattttgtccccaagaatccctgggggtgaggaagccacagaaaattgaggtcctattccctgctcactcctggtatgtagtggaagctggagagcctttgtccaggcactgacagcaggaggtttcatgcagagctgctcagggcatttcccagatctgtcccacccctgggaactggctcagtggccttgccccaccagaagactgggaactgcacccaagacaggttcagcccccccaggagaggacctgctggtgtgcgtgtccacacacagcacagaagcaaggaagatctggcaaacaaccttcaacaaaaaagaggccatttgcactggccacctgtgctgcttctttcctgagcagacttggttctgagccagggggtctccctctttccctcctccagctcaggaaaggactcaggcacatgtccacccaacctgcaggagagtgtggcacagcagtgaaaggcctgggcttcgcaggccaacttgggtttgatttttggctctgtgtcacaggcctcatgagatgtgctcacctcttagctccctcatttcagaatggggatgagaatctgccatgcccctgcccaccagccacctgcccaccctcccttatcatgtgccccgacctcccatgggtgctgctcatctgagtccctctgtcctcactatgacggctggtctgggaacccctctggccctactctgcttcaagaccatttagcctctgctcctgcttccttattttcttgctatttcccagctgcaatttctttgcaagacagggaaaggattggatatactcagcccatcttaatttttttactgtgggaaaatacacataacataaaatgtactattttaaccattttaaaggatgcaattcagtggcattaattacattcacaacggcatgcagccatcaccactatctggttccagaactttctcatcacctcagatggaagccccgtattcactaagaagccactccccattcccacctcccccaactcctggcaaccaccaatctgctttctgtttctgtggatttgcctattctggatatttcatttaaaggcatcgtgcaatatgtggccttttgtgcctggcttctttctctcagcaccatgttttagggtctatctacgttgtagcatgggtcagtacttcaaccctgttcttttttttttttttttttttttgagatggagtatccctctgttgctcaggctgaagtgcagtggcacgacctcagctccctgtaacctctgccccctgggttcaagtcattctcctgcctcagcctcccatgtagctgggattacaggcacgtaccaccacacctggctaagttttgtatttttagtagcgacggggttttgccatgttggccaggctggttttgaactcctgacctcaggtgatctgcccacctcggcctctcaaagtggtgggattacaggcgtgagccaccacgcctggccacttcatccctttttatggctgagtaacattccattgtgtggatataccacacggttttgtttattcatcagttgatgaacctttggattgtctcacattttgaccattgtgaatcatgctgctataaatattcatgtacaagtttttatttgaacacttgtctctaattctttggggtatatacccaggagtggaatcgttggctcatatggtaactctgtgtttaacttattgagaaactgcccaacagttttccataacagctgcaccattgtacgatccctcaagcaaggtgcaagggtatcagtttccccacatcctcatcaatgttcttgtttttatggtccttccagtgggtgtgaggctctttttactttttaatcaccaggcagagatctctcaaccaactataaaatgattaaatgactgatagcctttgtgatcaatcagactggctggagaacaggaagatgagaggagcctggagtccctgacccagaaggtggccatctcaaatgttttttccatcttccagggctgtggactgggcagtttgggacccgggaggggcaggccgtgagacctgtctagtgcacatgtgcgacctcatccgatcctcatagtaacacttactaaaattcttaaccattaccccaccagtctatgtccacacggccacgctcacagccgtccctgcagtgtcccaggcccactctcacttgttctttgcagaacctcatgatgaatgcagcatccactgtttccttcttctgctgctctggttcccctccaccgaagcactactttgtccaagaaactgctccttcccaccaggcagcgccctaggctggggccaaactagccagtatcaaccacaggcttctgtcccctggcctgagatcagattcttagctgcacagctgcccctgagagttcctttccccaggatgtgttctcaagcgggcaatgcctcaagcctcctgttgaggctagaggaaggaccacctcctgttcaccagcatgcacagactagacaggacggctccgtctgtcgcgcttctgttggtctctcatgcccaagggtgtggctctgggatcagcctgccctggttcggatctacttaattgtcactgtcactttcagctcgttatttagcctccagtgcttccattttctcaggggtgtagtgggatgatgaaaacaattcccgtttcgtagagtagtgatgaagagtaaatgagctaatcccagtaaaaagctttaactcctgagccacagtaagtgctcagtttatctaagcatcattatcaaacataaacaatcatttacagagtgatgaccaccgtatgctccaaacccagggctgggggcctttcctacttctacagtgacccttagaggtgagcagtctagcccccactttagggataatgtgacgaggtgctgagaggtcatgatctcccagcagtgagtgacagagcctgaggtgaaccccaaatctgtctgactctaaagttcatgctcattccaatcatggcaaagaaaatgcagtgtcttctcacgaagggttcatccctgcctcctcagtggctgtttcaaggagggccctttggtttgcccagatagactattcacactgaaagtgacaatggagaaactggccaggacactccaaggtcacagagaggtttgtggaggtgagatgagggtctcagccggcggggagggattccggagggcagcgatccctaaggtggagccttccagccacaggatgtgtgacgagaaagttttccctcttctcccctcacagcccgcaacaaaatctacatggcttgccaatattcttggagaatgaatttggggggctgtatttgtttcccatgactgctacaacaaattaccacaaactgagtgggtttaaaacaatagacatttattctctcactgccctgaaggctagaaggtccagatcaaggagtgaggacagaagaaggtaggcactagaacttgacccagaagcctgtgacacacacacaccccacatccttctccagccccccattatctgtctcctaggaacaaggacaccactacattcattccagaaaagaccccttttgtctgccagccatcctcagagccgaaaagcaaacctttgctgctgagagctgctgatagaagagcaggaagcacagttaaaggggaacaggctcccaactctggggcagcagatcttttgggcttcatgtcatagtattgtaaagacaattgccaaagtcagacaagatcagttgtgtgatcttggcaattcactttgtttctctgagcctcagtttactcacccataaaatggggagaaccacgtctacctgactgactcgtgatgaagatgaaattaacacaaagacaaggctgggcgcagtggctcacgccagtaatcccagcactttgggaggccgaggcatgtggatcatctgaggtcaggagtttgagaccagcctggccaacatggtaaaaccccgtctctactaaaaatacaaaaattggccaggtgtggtgatgggcaccagtaatcccagcgactcgggaggctgaggtaggagaatcgcttgaacccgggaggcagaggttgcagtgagctgagatgcactccagcctgggcgacagggtgaaactgtctcaaaaaaaaaaaaaaattaatgcaaagacaaaattagtgtgggaaaaccctttgctcagagaaatgatggccacaaagtcatattactccccccttactctgtaaaatctcctttgctagaggaagagttaaaagtccaagtgggaagcacagtcccgggcggaggcagggaaggctatcctggctctgagtcgggctctgtctacctggattttgtgcctccacgttccctttcatcactctccaacagggagatgtctgtctcccctcagtgtgatagtaatataatggggcctcctggtgctcctcagaatcacgtgctctgggcaggaaaaaggtgcaattctcctgcagaatgtacacagcaaagactggaaacgagaaaactgtcttccccagggtggcttcctaacaaatataatgagaaggcgcttcctctcttcctttcagtcacatggggaggtcaacagagagcaatgactgtcctgaggctatttatttattttttgcctgataataattataataatcacttgcatttattgagttgtctgtgtcaggcaccgggctaggcacttcactgcatgagttatcgcaagcaatctttccaaagggattaggaagcaggagttattttacagatgaggaaactcatgcatagagaggttgagtgtgacgctcatgttagcctaacatgaggatccaagagcttatccatttactcagactttttgattattttttgtgcaatttcacagacttttggtgatgcataaaatttttttagagtactagtttgggcctggcatggcagctcactcctgtaatctcagcactttgggaggctaaagcagcagaatcacttgaggccaggagttcaagaccagcctgggcaacatagcgagacctcactaaaaataaaacaaaaaataaaaataatacaaaaaattagccaagcatggtggcacactcctgtagtcccaactacttgggagactgaggcaggaagatgtcttaagcccagaaattcgaggttgcagtgagctataatcacaccactgcactccagcctggatgacagaacaagatcctgtctctaaaaacaaacaaacaaataaacaaatactactttgctcattcatttaagtcagtaaattgtgacaaatggaaaaatgcaagaaaaaaaaggaagctggacataaagctagaatggaaaatgcatgagctcttgctggggtgggtcctaatttggcttttagcttcctagcagcccttgcaaagaagaaaacaagatctgttaggtaaatctctatagcagtggttcccaagacatggtctcctgaccagcagtatcagcactacctgggaacctgttagattgtccctctccaccctcgaatctgggagtcaggcccaggcatctggtttaacgagccccctaggtgatgatgatacatgctgaggagtacgaaccacttatgttagaataaatacacaccagcttctaacattgatatcgcagagaaatttctgcatgacacagtgagctattatattgaccaaatccccattataaacaccatcatgtacttaataggcctttttcttaacttcctacttagcatacactcatgaaaccttctcaaggcacagcttaatgaaattagttccagaggcaccaagctatgtcacccagacacacagcatgatgggctggtttcatgctcatgcacacttctgagtagtgaaagcctggagaatatcccagcattgctgttagaagccaggactctggagccaggctgacccaaatttgaatcttaggtgcacctttcattaactgagtgaccttggccaattcccttaattccctccctctgcctcagtttcttcatgtataagaggaaaatgactattttatgtattccatggagttgctgtaaaaattcaatgggctaacagaccgtatgcttagtatggtgcttagtatgctaatgagtccttataaatgttcccacgattatgaactgctagagtgtgtttcctgtaggtaaacctccaagccatcaaacctatgtccatgtctcctgccaccatctgtcctggatgattattgttcagatgcatattccaaacttactgagtacctagtatgtgcggggttctttcacttatatcatttgcctttaaacagctctgcactgtagttattattacccattttctgcatcaggaaactgagttccccccaaaatgaactgacttttcaaaagtcacacaggtattaagtgccaaagccaggatttgattccaggccttctggcttgacagtggcactcaaattcatcaagtgtttcttgaggatcttgcagatattttctcatattgcaattctagtctctgattttttagccccagctgggcaggaaggaagcaggtgcatcagtttttagaactagagcaggacagatgcttagaatgtatctggttcaagcccctagtttatagctgtgagagtccaggctacaagagggacttggcttgccctggacccaaagagctaagcagaacaaatactcacatttggtgctgctcatttctctcccctgggccccacagcatcttcgaaaggtgaggtcaattcccatgaaaagtaccacactacgaagtgcagccaaggtccagaggggtatggcagagagcttagggttaattgattagagcaggaaaaggtcagaagatgtggaatcatccacatagcccttgcaaggaggtatcacatacatccactcagggtcgaagacacagacagcatgtgtctctctagccttccctctctcctggagtccatagccttggctgcctgccaggaacccggcacacccacctcccaacacctcccaagcccactccaccttcctcaaagggtaacctcttcctgacctaatcgttttcagaggaaagagcaggaactttggagtcaggcctggtttcctaatcatcatattggtcaaagcaagtcacacagccaagcccacaggcagtggggctgggaaggacagagagagaagggagaatcgctactgaatgacagtctaccacacctattgtgcaaagtgctggaagggaggatttgttcattcattctgttaatatatattaactgaacacgagccaggcactggcctaggtgctgaatatgcagcagtgaatgaaatagacagaagtacttttcctcctggagttcatgttcaagtgaataatggccccacacctcgattaatccacaagcacttaactgtctaccctgtcaggtttccatatgtgccagacacatcatgtccacaagagattctctgcaaccagcgagctcatggcccacggggaaaccagacagacagacacccaatgacaacattgaaggcttgcacgcacgaggggccagaaaacaccccacatggagtgggtcccactctaggccactctcccatcccttcccttttccaaatttcctccctagccacatgccttggtttccagggccagccagctgtgcaaaatgcctagcaagctctcagcaggcccctgctgggcacagcacagagaaattaagtgcaattagcgtaactaagccatcaccagtaagaggcacttgctctcctggcggctccctttcggagactaatggggatgactagagaggaggatccagagcctatggctgaaacctcatcaacagcttgggagagtgacagccagccagtcttctgcccgcaggctgaagaggcagtgcttcccagggtgagccagaggtcaggaatcagaaggcctccccagagctcgctcccattttcctgagtctaggaagatggagtaaattggtttaatggagtggagtcccgttgtcatggtggcaggaggagaacagacggatcgccctgctccagcctgacaatgtgaggctgggcttttagcaaatgtggccggctgtaattcagagaactcaatttgacccatgctgtatcttctttcagataatggccgtgtgtcctgcccttcccccaagtggggcaggctagaaacctctagtggactcctcaccccctcccaagacccagtcaatctatagggcccgctggttccttcccccaggtctctcctctctccctggattgtggcaatagcctcctgaaggttcctctgcgccccagggctaagtcctggtcccatccgctcttcacatacacacacccagcatagcacatttttctagaactcacacctgaacgtgcctctcctctgttgaagacatccccagaagctgatccctttgttcccaatgcccttccaccctgtctccacctggcatatgcctgtgtttccctgaaattccagcttaaatctctctccatgtttggccttctctgcctcttgctggattcctcatctcgcctcccaccggttttgcatggatccctgccactacctgtgtgtgtccatcgctccatccattgagcctgtgaggggaaagcctatttaattcattgtcacatcccttccctggagacagagtaaaatagctaataattagacaaaacattaattgagtgcttattttatgtcaagtgtgatttgaggactttatatgcactaatttatttagcttcccaaaactccattaataggtactattaatgccccctacttgaaagattaagcaacagaggcatgaaaataataaagtgatatgtccaaaactacacagctaataagtgagagagccaagatttgaacctgaaggagatgggagggagagaaatagttggggagaccacagggaaaggaggaagaagagaagggaagaaaaggaggcggggagggccgggagctggaaatgtacctttgtattttaagtcattgagatttgggggttgttactgtcacagatcctagcctgttcttactaataaaataaataactaaatttataaagaagtgtcagaaaaaaaggtcatattagaccacgaaggatgacaaagagcttcttaaaaagggaactcaaggcccaaacatgggtattgttgtgtcatgtgaatccttcacaggggccacttggtgtctgtgtggctggctctttgtggccctggagagggaacaagcatgaatgcatcagtggcttccagcctgaacagaataagttcaacaagagatggccccagctccggtgtctactggggaggtgatgaagtgaagtgttcaattcctgcatagccaccaacaagtccctggaaacacaattgttgaggatgtgtccctcggggaggcatggttcatctggctgtgtcacaaagcagatgggaacagctggcgaggaaggactgcctgtcctgggaattgccctaatcatcttcctaaatattgccgcagccaggaggaaagcctgattccctgcagatggggccattgacaggatgctactggtccgggttgggagaaaaggaatgctgtaaacacagtcagcccattcggcaggcagtggaagctgtctgaggcttcagggccccctcctcactaggggctataattcatgcagtttcttatctgccagatggccaggaggacacatgcattccagtggtgccatcttctaagtgttggcagcttgccagtgatctcaacttcattttcatcattgccttttgagactttttgttcttaatcaccccaaccaaccatgaaattttaataccagaaatatattctctgtttacatactttatgcaaaatctgttttttaaacgtaaaaaggggattttttcacacgtgcattcccacaagaaccaattctctcccccgttgagaatgcctgttgtacactaaaccttcagataaccattttctgcaatcagccctatcagatttggagggagagaagcaactcaccaggaaacaaatgctctttgcattgttttgtctcttcccagaagcctcccatccaccttcagctggagttgagctttctaacatcactgcattcctgcacatccacattaccatctttatgtatttgattcctccttgagggcaaggcctgtttctctgttgtttacaccccctctcagtgcgtgctgtaaggtaggagcttcacagatggttaaagcaaaacagaacatgggccgggtgcagtgactcactcctgttgtctcagcactttgggaggccaaggcgggtgaatcacctgaggtcaggagttcaaggccaacctggccaaatggcgaaaccccatctttactaaaaatacaaaaaatagctgggcgtggtggtaggcgcctgtaatcccagctactcgggaggctgaggcaggagaatcacttgaacccgggaggtggagtttgcagtgcgccaagatcgcgccactgcactccagcctgggcgacagagtgggattccatctcaaaaatcaaaaaacaaaaaaaggaaaaaacagaacatgaaagccactttcccacagcctgggcacgtagctactgtggtgaatcacctttcctggcagagcacactcaggaaccgtcagctccaaaagcaccaaacagtttcattaagaccgtggctccttcgcagaagcacacggaacgcagactgacaagcctgtgataacattttaatggcctgagttcagttcccaataaaatacttaagtttctgcaatcatggagctggcattttcattaatactcctgattaattgtctgtcctaggaaaaggctcatcaccgtcacaatcccgatcttgctagttccttgcagggagaatcccagcagcctgggcttttccaccaggttaaagctggcaaagggcaaggaagactccctggcacctggtaccctccacttgccatggtaacagaggattacaggctctaagcccagctgctgtccttgcattcagacctcaccactcatacactgggacctggaactacttaaattgcctcagtttctttatgtgtcaaatggcgtttgacacataaagcactaatactaatagtacttacataataaggttgttgtaaggattaattgagttggtacaagtaatgtcctggcacgcatctggcacatagtgagtgcttcctataataaacagtagctgggtttgttgttgttttactattatttttcctccagaaaggcgagagttgcatcagccttggaagaggcaggactgagatgtttgggaacaagaccactttcacagggggcagccttttgagaaatgtcatgtctacttgatagggctttaaatatggagtagtgggaatctgcacatttggattcaaatcctggcttttccaatggctgatgatggaacccttataggctcaaatcactcacttctctgagcctccccaaaaattgagaataacagtttttattccatagggtagttttgagaattggtaagatgatcataaatgtagaagggcctggtactcataactgttttcttcatttatttatttagtcaacaatgttttctgagcacctaccctgggccaggcacactgaggtgggccttgggattcatcagggatcaaagggaaaaggcatcccatctccgtggagcttcacatcatcgtagttaaggtggataatgactgtctcgacagataggacagtggccaggacacaggccttcagtctggagcatgcttctcattttgaaataatttcttgttcagagtcaggttggaaggaaggccttgcaggggctgggtaaggatggcggcatctctgcgttcacgtctgtgtgctcaccatgagagcccacctctctctggcccaagtttccttctgtaatgtgaaagaggtggggttccatgctctcctcttcagcatcctccttagatactcaatctggcactcatcagtttcggaccctccatgctgccccaaaggaagccacactgcaccttcatccagtttcttaaacctgcatgttctctcttgcctctagaccttcgcccaggctattccatctgcctggaacatgcttccatacacctgccttcacttggctaactcctacttctgccttgtgccactgcttggattgaatgtcctctggaattcagccttcctggatgtccctgagctgggctagggtcccctctgcccacctctgctctttgattttccctgttcatcaccccagttatgacactgagttgtaactgggatttctaatctgtcgcctccaccaagcagcacactctttctggccagggtccatgtcttatttgtcttggtatctctagggcccagaatctggtacctagtgaatgtgtaacaaatattttctctgagctaaaataggaacacagggtccctgcaatgaagaccccaggtctggaggggaagacaaggtagcattacaagataacaggccttccctgcaaagcgtcagcactcagactggggcattgtggacaagaagggtggagaggagagaaggcatgaaggcatcccagatagggacacagcagaaacaaagacaaaaaggccggataagcaagatctctttgagccggcaggttaagatgggtagtggaaagctggaccactgtcaggttttgacccctccagacaatgcaccgtgatcttctggcttccatatgtccctggctgctgctgcctgctgcccactgagggacctcaccctccagactctaagtgatcttaagccaccagccttacaaattacagcagacagagggggtccaggcccttctagagatagtgttcacagcactttcccaaagctggttctgctcaattccctaaaagatctcctgcaatggggcctccagggtcctaaaagcaccatctgctcttaaagagtctcactgctcattagcatatcaaaggctctgaaatgtcctgcaggaaaaaactctgggctaacttttgtagccctgttccccaaactaaattgaatgaaggattctttttttatgacccacctacagttctgcagagatcctccagggaatgcagatctaacccattctctgtgcagtgaatggcagagaaaattaaagtgattgcatctattgcacacttacttttccttcgaggtaggtgagagagtaaataagatgcaggagagaattacaaccggagatataaaacagttgtcttacagggaatagtctgtttgcccagggaggaggttttcagaatacaaagtaccatttcttctccacgacatccccaggggagaaaggaaagtgaaagaagccctccaaccgaccactggagatgggagcatttctgctggtttcatttacataagtgtccttggcaatttgtcccaatttgtctcattataaatgatgtaaacatccgggcgtaatcacagacaaaatgggatggtttaaatgctgcctgattaaaaaccctgggttggctgcaatgacttgcaggcatgctaacggcttccctgcaagggactttggtttcaaagttctgagagctcaggagggtccctaggtctagttgcaaagtcatgtcccccatgactctgcaactctccacatagagcctagcaagaatgcatcatcttctctatatctcttataaggagggaaggaagaaagggagggaaggagggagggggagagggagggagaaaggaaagaagaaaagaaaggaaagaaggaaggaaggaagggagggagggaggaaaggaggaaggaagggagggagggagggaggaaaggagggaggagggagggagggagggagggagggagctaactgacattttcccctttgccatctgattggcatgaagggcaatgtaactgaggagtctggggaccaaagtgaatcctagtaatgtcactcacttaatatgtgtgattttttagaccaatcacatcatttggccaagcctcagtttcctagtctgtcaaatgggaatgatgatttgacatctggtgtgtctctcactactgttgagacattatataatgagagcatagccctttataaagacagggtttctgtcctctttcttacttcattctttccttctcttctttccttctaatagaaggtatagagaagacagcacattcctactgagctctatatggagagctgcagtcatgggggacactgtctagatctggggaccctcccaagctctcagagctttggaaggaaggtccctgcagggaaactgtgtgtgtttcttcaacagtgtatcctcagtgcctagcacatggtaagtgttccataaacagctgttgaagagacggatggataactgaatgaatggatgcttccatgggcaatgacacactaatctgaaaagccctgtatcaatgaaagaatcacttaatagtttaacttttccctcatccttcagaacacagatggcatgccatcttcccttcaaatctcttcccagtgccccacacagaagaggcacacttggacactggtgtctgatggacccaagttcacagcctgtctctggtcatcaggtatcatgaccttgggcaagaagcttaactctctgagcctcagtttccccttctgtcccccagggaaaatgagtcctgcccctcctaagggaggtatgagatgtaagaccccgaaggacacaaaggtttgccaggagccttcaggtaggaggcaggtaaggaggtctgctagattggaatgagtttctggaaggccccaaggagctcaaaatcagacctggggtgaaggtgtcttgaccaaaatgagacccatcaaagaagcctggatgaaggtgcccacagcatccatcagtgccaaaaacagaaacactttagcccaggatacaaggaacattttaaagcaacagagataagagatagttagaactcaggcctcctggctcttgctgttcttggcccataattagttgttatgggaccttaataaacttcttgccttcttggtacctttgccaaacaatctgatgaggagaatattgagtcatggtgccagggaaaattagcatattctgcaaattcctggcactgttaacactggattctgtccacctttagaaatcctcagatcactatgtcagcatcccccaatcacagctctccaacttcaaggagggttgaggggtctgaagaaggagagagaggcaacagagccagaaacccttcagaagatgccaagagcaaggtttggacccatagtccaccacttactaacttcaagagtgttatgagctacaaacttctcagtctccgttgactcatctcaaaaatggaagtaaaattatttaccatgcaatatgttgtcaaaatgcattgggtttagttcatagcaggtgctcaaagaatatcagttccacttcccttgtccctagagagccttgtagtggatgttgatgtgtcttccaacacatgcaccaacctttccctgtcctgtagcagttgagatggaatcatcccactcccagctccaggaataggctctgatgggcttgaacccagcagcttaattccattggttctctaggccttcatcattagtacaggaaaggcacttgacctaaattagttcgataagatttaagctcagaaatctggtttgttggatggagaaagagatgctttctttctctctggaaggagtttattgcaaaagtaagggctggggctgctacagccattgtgctaccatgagggaactagccatgataacaaaacttgcctggggaggggctacgcatcacagaaaatgatgccaaagtcctgctcaaactgtgcctgatgcctgcctgatctatggacttcttagttccatgtaatggattctctctatttttaaagccgtatcaggttgaatttttggagaaataaaacaaaaagcatcttgactaatttaaaaaatcttctttgggtattcaaccctcctaaactcacccccaaatccactgggagcatgtcaagatttttgtgagccgatttaggagatgcaaattcatttgccttaattggatctccaggaaatgacttctgccccctcttaaatcatttaaagctcaaagaggcatgagggccctccccaaggatgcaggtatcctcttgactgacagcctgtatgctctgcttccaggatccttccatctcctccctttactgagggagtctgctatgtgttagaggtgtccatcactggtcacactgggaagctgtggcagggaagctggagaaaaagcaagataggccccagaaagaacaccaactccagactcagggagactcaggccagaatcctagctcaacttcttccaagctcccaaagtcacactcttttctctgagcctcgattttcccatctgcaaaatggggatactaagggtcacctagctgggctgccctggagattccaagacattaggcatagaaacagtctggcctagaccctgtaggccagtaggcatttgatcaatggcagctgtggttgagatttttatcatcattatggctgcccttcctgctttccagggctagtgtagatctaagattataggggctgcaacgttcctcagtggagcagatgcagcaaggtagtaagagagggcattctcacttgtccccacagagtgtggtgtgggggagatctgtgagcaccccagcagccatgagggtcagcacttgaatctctgcaggtcagtcatactcctctttattatttttatttttatttatgtattgatttattgctctgtcacccaggctggagtgcactggcaccatcatagctcactgcagccttaaactcctgggctcaagtgactcccacttcagcctcccaagtagctagagccacaggcacatgccaccacgcctagctaatttttcaattttttgtagagacagggtctcactgtgttgcccaggctggtttcaaattcctaggcttgagtgatcctcccgccttggactcccaaagtgctgggattacaactgtgagccactgcacctggccttattcccttctttttatcagttttcaaagccatcagtatgcagagcactaggcccagaaatgagaggagaagagagatggaacgacgaagaccaaaacctctgtcctcaagctgctcataagccagtatagagacgtgtggagtctgctgtcctgagttccagtcccagttccccttgcaagcagccgtgtgacttgcagcaagtcattgaatccctttgagcctcactttccttgtctagaaaacaacaaaactggaaataatactgcttcccttccagtttgtcaaggatgaaggtgctttgcacggtccctggagcaaaatgtgttctcaatcaagattccgtctgtggtgggtggagccgcgtccttcccaaattcatattcactcagaaccttcaaatgtgacctttttcagaaatagcatctttgcaagtttaattcagttatgggtctcaagatgaaatcatcttggatttggggtctatccgaaatccagtgactgatgtccttataaaaagaagggatacaggccggggccagtagctcacgcctgtaatcccagcactttgggaggctgaggcaggcagatcacttgaggttaggagttcaagaccagcctggccaacatggtgaaaccccgtctctactaaaaatacaaaaattagctgggtgtggtggtgagcacccataatcccagctactcgggaggctgaggcaagagaattgcttgaacccaggaggcagaggttgcagtgagccgagatcgcgccactgcactccagcctaggtgacaagcgtgagactctgtctcaaaaaaaaaaaaaaaaagagtggatacagagaggcagtgaagaaggctgtgtgcaaagacaggcagaggttagtgggatgcagcgcgaggctaaggagtgtctggggccaccagaagccagggaagcctaggaagggttttcctagagcctttggagggagcacagccctgctgacaccctgacttcagactcccagcctccagagctgggaagggataagtagctgttgctttaaaccagtggtccccaacccttttggcaccagaaaccggttttggttcagtggaagacaatttttccacggacagggtgtgtggggtgggagatggtttcaggatgaaactgttccgcctctgatcatcaggcattagcattagttagattctcataaggagtgagcaacctagatccttcgcatgcgcagttcgcaatagggttcatgctcctatgagaacctaatgcggcggctgatctgacaggagcggagctcaggcggtaatgcttgctcgccagctcacctgctgtgcagccggggtcctaacaggccacagacccatccgtggcccaggggattggcgacccctgtctttttttttttcttttttttgagatggagtttcgctcttgttgcccaggctggagtgcaatggcacgatctcgactcttcaacctccgcctcctgggttcaagccattctcctccctcagcctcccaagtagctgggattacaggcacccgccaccatacctggctaatttttgtatttttagtagagatggggtttctccatgttggtcaggctggtcttgaactcccgacctcaagtgatccgcccacctcagcctcccaaagtgctgggattacaggcgtgagccaccacgacctgcccggggacccctgtcttaaaccaccccagcctgtgatactttgttatggtgaccctaagaggcaaatacaccctcctttccccaacctctcccctcagacgaaaccgatgcgaaaagtgcttcatgaagtttcaggtaaagaagtctgggacgaaaagggatagtgaggatggcgggaggggctgaactccaaatgggcttatcaaggctctgcaaaatggcgtgacggcgctgcccccttctggtggcctgaagactaacgcacatgatgtcaagtgcggggcccaagtactcaggaaaaggttctcatttggacactgggaggtcttacattgggggccctgagcctccagcccttccaaatctattctcagcaggagctcagccacacctgtgtcccagaactgaggccaggcccagccttcactccacgcccagccagccccaaggaaccgactccctgaggctctatgctccctgcctccagtggccccgtgtctgggaaatagtggccctggcctgatgccctgacctgggcaatccatcccctggtcctctcagctcccgggcccaggttttctgggctactttaaccagggcaaactcattcctcgagtacaaaataaaagattcgaacagcataatcaaataggtcatacccataaatcaacacatttgagcacctattttgttgttctttcactaatccaaaccatatttattgagcatctactatgtgccattctccagtagccattctaggtgcaggggatacagcagagaccttgaaaaaaggaacagtctctgatcttgctgagcttagagtcaagtggaggtgaggaggaaggaaatgaattaacaactaagtgaagcagaaggtaaccaattgattgactgacgaaggggtacaaacaacaaacaccttcctttctccaaactctatctttaactgtattctctcgttttccttcctctccattttacaatcattttacaacatctctggctattctcctatatttctgatcacttcggttctcatcacaataataatttcagttttcaagcattggaaagtcccatccaattaaaatgtcaatctcacacgcagtttaaacgtttcgcctgcccgtgagctcagacctgtcttggtgcctcagttcttgtgtggaggggaggagaggagaggggaggggaggagaggaaaggagaccggggaggtggggggggagaggggaggggaggagaggggaggggagtgggggagaaggggagaaaagcgcagctggcttcctcactctcctttccttcctcaccatccttaccctggcccagggcaggaggaggattggcagagtagaggcagggtcttctgtcttagctgggcctgttggtgactttctgttggccaacatgggctgactggaatgttctccagcatggcacatggtcatccagatgcaggctcttccctggggcactatagcagagagggctctcttccagtctattgcagatggatgccctcgtgagctgagttttgatgaacatcccatgtccccagccaccccattcagagcctctttctactctggtcctctggtcccagcagcagccctctgggtactgaggggagggcatctcacccaagccccttaaacctgctcaccttcttcagagcccacgtggccgcaggaaagtcacaaacccttgtgctcccacagggcacacgtgtgcacacgtgtgcagctaccttctctctagttggtacctgaggctgcctcctggattttccagtctctgtgttcccagacaaccccaagccccaagaatacaagagctctgtcaccaagcatcgggcctgtggctgcactacacgtctgcagctcaggacccctggctgcggcgtaagctaccagcatccccttctcatgggcaccctcatctccggctccccatcgctgggctgtgacctgcgggggcgcccctctatggaagggaaggagaaaaattcacagtgctatctactcctctgaatgcactcccaccaatttccttggaaatttctagctttcactgacatatctgggatggggcggtggtcacaaaatcaatcccactttccctcggctagtcttacaagcacccaacagctctattcagaatacagggctgcccagctacttcccattcattatccccaggttgcaagctttagtcaaaacccagaggcagcagggtgtctggttccacctgctgttaggatgatttcaggagtgcaaagtgttagaaacgcggtaaaacatgatgcttagagattaagtgggatggggactgggcagatgatgctgctttggacccagcgagtgaggtgagactgcgacaagacagagccactgagcagtgacctgggggatgggcattgcaggcaaggcagaaccccaagtgggaacaacctcactgggcttagcaaaactaaagaggcccaaagtatactgagcgatgaggtgagtggcgtgggataaggttggagaggaggctggaaccagaccctgcagggccttgcaggtgatgggaaggagtttggaaggtgctggaaggtttgaagcagaggagggatatgatcatgcctgtagctgctatgtagaacaactgtatgcatgccaggcctgtgccacgcatgctctaatcattactggctttaacccttgcactaacgttgtcatgcaggtaggagcatctgcacccagcaaatggaaactgaagctcaggaatattcagtcacttgtccaaggctccccagctgttaggtgctaaggctggattcaatccaggacttgcagactccagtatcttggcttttctaacgagagtgtgctagctttctaatgggggtggggaaggcagtctgcccccctcccatggcaccgtgagcaggtgtcactgctccagccagtacgcctggacaccgactaggaaggagtatgtgctactaggagggatggtctgggctgactctttgaagttgacaaggagttgcataatcccagctaataattatgctggaccaggggcagagacattactccaagggtgaccaggtgtggagaagaggctgctgactccggggccccaggacctggcccccaggtctcattgcccgagtgctgccccagaaggagtagaagctggagctgtccgggccacagccgaggctgggtgaatgctgcagtgaggctgccgcacaagttgcgtgttgtgacatttgtcttctggaggggattgggatgggctacttcagcatttaaaaacccctactaggtctgagaaatcccctcagcttatgagcctgggtgggcagcaggccttctcaagaagcccagaaggccagatgctcacttcccaggctctcttgcggctgagctgagagcaggcacctgaggcctggcaagtgtgacagctggtgacacagacagacagggacagggagatgggactgtgcctgcagcggtagccctggccggtgttcagtggggccagcatccgtgtctttcctgggggccagtgggggccgtggctctgacgatgcatccctcccccacgttttttctcttcttgtcttggactttgcagggagcactctgcttttgggaacaggagctgggtctctggccattctccgcagcccctcaccattcactcagtggctctcaaaaaatagaacctggggcaaagctgttcttggccccaaacaacatgaggaaaaataaataaataatgtacctggtaactgagagagttccctctgcatcttgggctctttcaatgagatgtcctctgcctgcagcaagccccaagggcttccctcaccaggaccagcaccctggtttgcctgaccccacacctgccaatgccggggcaagaatgtcccaggctgccctggttcccagagctgatgcttcccacagtgcccagctgtgctggcatggagctaaggacagggccagtcccaagaaaacaacaaggctccagggccaccggccactgctcaggaccctggctgaccccacagatgcggagtgcctgagatggctcatgggtgacccccaggcatctggcaaaggtcacaatggctgtttggcttgaagacagcccttgcaagatctgttttgagccaacctgtggcatttagccctccctgggtgacaaataaaaaggctgaggcttgtaggagccaaggtgggagtccccatctacccccaccctctcagcccaccagggcccagactggggaactgctcctgcttcgagggacagggctgaagaggagaggggcttggggctccccttgatcccaaagctccagggaccccaaagaaacgtatcagcagcatgagaatatcgggtgacctctctctctagtaaatgtcaaaacttttaaccaaaatgccttcatcccccagcgccaggcctgagctaatctcataggtgtcaggactgggagcctggacccctcttccttctgctcctgctttgcagagaagtgagtggggaattcccgcctctgggaattcagagacgaagtgacagagacagcattggaagataagaatgcagccaaagaggtcttcagggtagcgtgtggcctgggcgctgagactattgggcctagcaacttctcaagcagtctattaaccacagccggtagccagcttttccccgcccttctcccaggcacacacagccacctccatcaccaaaggtcaggcgaaccacctcccatggctacccccagcctgacttgctttatagaaatcatggcatctcatcctcacaacagcccacactcacagtgaatcttggccattatgacaactggggacactgaggctcggagtggtggaaattctcagaatcacataacaataagtgttaaagtcagaatttcaacttcatctctctaactccaaagggcgtgtgtgtgtgtgtgcgtttctggccataatcatattgtgccctacaagccccagtgaggaatctgctaggaacactggtttggggaaaaaatgtaataaaatatgtgatccagaaggcggccttggtacctgtcataaaccgcagcatggggtactcactatgcctggggtctgggctctgaaggcatgattgaatgatctcactgcaggcctggttgtcctgcgaagacacccgtcaatacatgaatattgacacacaacgctgcagtgcacgcgcttctggcaggggagctgctgcactcgagggcagctcaaggttaatttgcagggttcatgtttggagtttctgagcaagtgttgcagctttggcccccagccccctgaggggagctctggccgtgcatgagggtcagacagaaaatctcctttcctccatccaggcctgcagtctgcagcactgaggtcagcgctggccacaagcccaccctgtgcctcgtcagccccactgagcctctccatctatcatgccacaggctgaccctgaaatgcaaaatcattctgtcctcccgccctccactcccacctcgcacatctatggatttgctgttcagaaaacatctgttccctccttcgcccctgacatacgcatcgatctcatgctagcccagctgcctaagctcaccactctgggagacagactctcagtcctcatcagacagagatgtagggggctgtaagggacggggtgcaggtagggcctgaggattccgacaaggtgagccatgggcaggggcattgttcatgcagggacctcctggccaaggtcctacgtcaaggttagaaggaaagagtaaatgatcggataggctaagacagcaactcagcaggccaagggactcctcccccaggacctgctccacccttagaggggtcccggacagccaagccctgatggagttggtcagcaaccaaccagccctggggccaaggcctgcagaagcagagaggaggggtctcaggcaggccagaggtgctagctgggatgcctgggtcccccaccccaccccagcacactgtcctttctccaggtgctcagttagattgagctgggtcccatcttgggcctttgctggtccctccctagaaagtctgccccctccccctgcagggtggcatcagcattcaggcctggccctgacgccctcctctctgggccaccttcacctccacaaccccggcaccagcacccatccccaccacatccccagcacgcagcatctagtaagggcaccaaatgcatgcccagacatatgagtgaaatgaattaaccctgaacctgaaaaagggcaaccaccacacaagattctctagaaacaatgtgaattgtgcagaaggaaattaaccctactccatccagcccatcctaaggcagggacttggacctgttcctcttgatggggctggggctgaggcgggcaaggcaggcaagtgctgaacagttggcaacattgcccatcccgtctccctgcaccaggctgggcctggggtgagggggtgggggccggggtagctgggctcctccagcaaagagcaggactgagtccctggtgactattaggtaaaaggtccctgacaattttgaggggccagatgccaactcgagggatacagagaagatctaggcacagtctttccccaccatgtcagacaaaaaggttagatacaggacctgatatgttataaaactcaatcaatatttacttagtgaataaatggacggatggatggatggatgcattaggcagccaagtgggcagcaccgatgacttaatgtactgagtgctccgactccagcaacatgcattcattgttcctactgtgtgccagtgaacaagagcaatgaactcaatgacttctgcccagggtgggccagggaaccagggaagactctccaaaaaggcagcatttgggctgggacgtacagatgagtagggggtcgagtgtgtcgttatgtcgctggagcccagaggcgtccatcaggacttgggggagggcagatgaaagggccttactgcctaacttggagccactgtatgtttcaaaacaaaggagagagaggatcctgggaaagagaaagggtactctaggcagaggatgtgaatgggcacagcacaggtgagaacatcaagaccaggggtcagggaatctactggtaaacaattgtaccccaagggagcaatcacagcctctccatccacagggaaatgcctggtggggaggaatgggaggaaagaaacagattgcatgactgtgtcttgaaggtctaattccagagtacagcatcacccctatcttccaggtccagaaactgaggctcagagggagactttctgatgagtgcagcgtgcagataagagcatctccaaagctacctccttccccagtcacaccagggcataagcaactgataacagctgtcagcacgggacagtggagggaacactaggttaggaataagggtacgaggcttgagtacagattgtcaatgactcagtgtgtgaacttggtcaggtgactccaaccagatgacttccttctctgagcttctgttccctcctctatgaatggggacaatcactcagcttcacaaaacaatggctgcgaaattgcctggtacaagagagagaacttccagtgtgtaggggctgttgtcctaactgcccagccccctagataggtagttatgtcatctgtgaaatgggtgttagaattcctacctcccaggacagctgtgggcagaaaaccaaagaatgtgtgtgagagcccaagcaccatgcctggcacatagtaggtgctcaggaaaggctgagggtgcagctgctgtccacacacatggtaccactgccccaggaaggggcttcaggaaccaagagcaattctgagcactggtgactggactctgccattctccatttcaaacgctttttgaaagcagctccagacccaagcaggagagcaggaggcaaaagaaacgcaggggctttcccgaatggaattttagaaacacacagaattgtctcctgcacagaagggaagctgtcttccacagcacagagccaccaggccccagactgctggcttatgtatttgtcattgctcatcatgaatggatgccaggaaagtctctttgtgatgggggcacaacccctcaaatctcctcccctccagatgccatccactggagctgagactcccaggtcccctagggcttctctcccaggggcctctgggctccccaaggccacgtgctgcccccactagagacctgggccagtcctgaccaggggaaagagtagcgccgacaacagccccagatggtatgtgcactggcacatactggcagctgccttcatgacagcaagccataggtccaaatcccgccccttcacagggacattcccaactggtcaggggtggacctccccttcccggctgtctttggtgtccaggacgatttgccacagacagggggagctaaaggggcccacgcttgaggccgctcagctctgagtcctcgccggccacagaggaccttcgtgcctgtcctctgtcctcctgcccagtccccaggccaggctcagctggagttggggagcagaaaaacacgcatctgaatcaaggctctcggagcctttgcttctgcctccaagaggcgagggaaaatgaatacccaggcgagcgagcaagagagaccctcagaaaaccccagatgcccctggaatcaagccctgtcccaccaacgccacgtggattgacaggctattagtcttcctgtaattaggattctcgcctcaaatcttgtatctttttcccccagaagattctcctccagccttcaccactgccccctggcgcttccttgcaaggcttttgaagaatcctttgcagagaagcagcctcctttggcaggggctgcagagcactctgcctccctaggccagggcgaaccaacagaggcgggagatgaggaggagcagcgcggctctgctgcgtggccctgggcaagcaccacaacctctctgggccgtttgcacattcttaccgccagggatgtgggcggtaaatgaaagagaccagcacaaaccagtgtcagctcccttcctcgattcctaaaatgtgatgcccaaagatgggccagcctcctgctgtgccttctctggggggacatttaataagtggaagagccctggctctgagtcaggctagaatcccagttctgcacttaaccagctgtgtgacctcaggcaagcaacctggcctctctgaacctgagtttcttcatctgtaagtgggaacgctaatgctgtgctgagggttccatgggacaaccatgtaaaagcacccagcacgcacccagcaggcagcaggtcctgcacagcgttccctcgcgtgggggtgggttggggcttgagcacgggttgaacctggaagaggccatttccctcccttctccccgaggaataattgtgaattcctgggtctcagaggaaacatccgctttggtggtcagaaaggacatcctcctttgagcagggggagagcagagggaagggggttgcgagggtcacgccttccccaggcattctcggggtctctccagcaaggatggaggcggccaggggcttgggcggtgtggggcgccacctggcgtccagaagaggtaagacaggcggagcgggaccctccgaagtgggaggaggacgctggtcaggggaggaggggaccgcgagagcgagagcggacattctaccaaacacatggacaacacagaagatgaggaaaatgagcagggcagctagtcataggagcaaattttaaaaattaagtgactgaggtagtcagggggcctcactgagaagtggcttggagtaagacctgaagttggggactggatatgcagatgtctgggaggagagcttttcaggaagaagaatcagccagtgcagaggcctatggcagacccaagcaggaggcaaaagaaacgcagaggctttccaggatggaaaatgaagaatcagccagtgcagaggaatgtgcctggatgtgttccaggaatgtttcagaatgagctaaaaggccagggacagagaactaagaggagaggagaggtcagagagatggcggtgggcggaaggagggggcggggcggaggagggggcgagggggcgggggggcggagggggggacggaggggggggcggggggcggggcggaggggggatggggcggggcggggtgtggctgtgcgtctggataagggttgtggcttttatgctgcacgagaaggagagccattggagagcttggggcagaaacaagagctgatgacattttaatccctctggctgctgtgctggggtagactgtcagggccaagggcagagtgtgaaaagcgcccaagaggcttctacaagaatctagtgggagatgctgcggctctggccaggttagtggcagtgccagtggtgagagggatgtggttctgcgggtgttgtgaaaatggagccagcgggatttgttgacagaccaaagttgaggtgagacagagactccggaatgactgcagggttattggtctgagcagggttattggtctgagcagataaccagatggagtcaccactaacttagatggagaaggctggtagagtgaggaaatatcgggaacttatgttcggacttgttaagtttgagatggctgggagatatctaagtggagagggcaaggaataaaatgcttcctaaactccagcatccattcagtcccctggagagcttgttaaaccggatggatgggtgccacgcccacccctgcacccctgagttgcaataggcccaaaatgattcaataggcccaacatggggcccaaggttctacatttccaacagcttcccaagtgatgccaatgctgccagactgagaaccacacttcgagtagcaccaaagtaggcaactggatgtttgaggctggcattcaaaagagagatcctggcaagagatagaattttggagtcattggcacggaaatccacaaaacgacatgagctctcccagggagtgtgtgtgtgtaaagagggaagaaaagagcattgagtcccgagccccaggctcttcaatggtaagaggttggcagattaggaaggaccagcaaagactgggatgggaaaccactgaagcaagaggaaggccaggcagatgtgtcctgaaagccaaaaagagaaaggtcatcattaatatgatacattttgcaatttgtttatatgtaagaggagattaatagctcatagcattcccaggcattgctgttaggaattgcagctccaggctggcaacccttaaatcacaaactagattgtcaagaggactgcctggaattccagctctgtaagtaatatgctgtgtggcctcagccaggtcacttcacctctctgggcttctcttgcttccatatataaatgtaataagaaaatcttttatttattatttatttatttatttttgagacagagactcgctttgtcacccaggctggagggcagtggtgcgatctccactcaccgcaatctccgccttccgggctaaggcaattcttgtgcctcaacctcctgactagctgaaattacaggcacccaccaccacacccagctaatttttgtatttttagtagagacggggtttcatcttgttggccaggcttgtctcaaacacctgacctcaagtgatctgcctgcctcggcctcccaaagtgttgagattacaggagtgagccatcacgcccggccaagaagaccttttaaagtagatgttctaagagtctctttcagttctgaatctctttgttatcttacatgttaccccctcagagatgccttccctcactcccctgtccaaggtagctctccacccaagtcagcagtcatcacagaaccatcacaacctgaagccctgtgcatgttgctgtttatttcctgtttacatcacaacctgaagccctgtgcatgtagctgtatactaaccctagagttagtatagcttagttaaactttcatttattgctaaaggtttatcactgctgtctctatcagcctccctgcactgtaagggacaagggggcaggtccagtttctgtcttgtttcaggttttgtctccagccaagataagtatctttgcaaggctctgtttttattctgaaaggaaattaggagctattggagggtatggagtggaaggggacagtcttctgccttggatgtataaaagggatgctgggccacgctgatgggctagaccatggcaggcagagaaaacaggcaggaggccaggcaggggctgccagtgcccagacacaggccgggaggtgcaggtggcagtggcaggcagtggccaggccctgggtatattttgaaggtcaagccaacaggacttgccagtgggctgggtatgggcatgagacaggcaagttctcccagatgtgactccgatgtgacattttggagactccctcaacacccacctggggaagacagaccagttgggaggaaatatctggagtctcattttattaattctgagagtttgttgtattagacagtgaagcggaaatgtcaggaagtcagctggaaataggagtctggagttggggggaaagcctagccagagacaggaattgtggcgtcattggcgtagagacagcgtttaaagctgtgacgctagatgggttcaccaggggaatgagagtcgaaagagaagagcagagcagagctgagccctgaggggggcagaaaggcacacagggacagtggaggcaggaggcagaaggcagagggtggcgggccaacagctctgaaggtcagtgctctatcacaggggggtggccgaggaggggcccgaggctggaaccaggaggcactatcccaggcctgccttctcatgccagcagcagtgatctatcctcaaggagaatattgattgagcacctactgcatgcagagacctcatcaatggctcaatcaatatgacacggccacgcttcctgatccgagccctctgagcaggtattttccatcctggacttatccctgtttctcaggagagggatggacccaagagacaaatagttcccccaagatcgcacagcaagccagtgtaaaacaagcatagaaaccagcttttagggggctcaaggtgggggtcagaaaatgaggtgagagcaagcatttactgagcacctcctgtaaatatctcctacatacgaagtgctctacccacattactgaccacccaataaaggcaggtcctgtaattcccaatttgcagatggataagcagaggcttaggggtgtgaaacaacctcctcaaggtcatggcttctaagtggtggagccaggcctgcaaaccaggctgtctgaatccaaaatccacctccaagtccacagtgggttggccccacccccaacccatccccatcaccaacaggacggtggtcagagtccactgaatgaaagcatgcgtgcattcaaaatagacagccaatcagcagccttccatcagaaatgtcatctttatgacaacagcatcgattccaggcgtaccctgcatatgtgaaccaagggggatggtggattgtcctttccaagcacttcccagccccttagagtcccacaggcccagaaccacggcccttgacaccctctacccacccctgctcccccttctcctcagaccccgagtgtctggccaggctttctcactgggaagtggccactccatccaaatgaccaccgcacccctcctcaccagcttccctgcttctgccctggcccccactctttgagtccattcttcaaccagcagacaaaggggtgctgtacacgcctctgcacagaacccctccaatgccttctgtctcaactcagagcaaagggcagcagctagcacactccaaacactcccacccacacctcagctcctccctctgtccctctgctctattccctcagatctgacggctccatcccataaacgtggcacacacacacctgcctcaaggcctttgctcaggctgttcccactgcctggagcactcttcctgcagacacccacgaggctcattttcctttagtgaggctttcctggccgcctcttccagataacaactctcctctccttccctgccctcctgctcctcctgttcgcgctacataacagactctgtggggccttggtttatgtatttccttctctcccctactgaaatacatgtgagcgatgctggggcaggccgactagaagaagcagactatctgcttcttctccacccttagaatggtgctgggcccagaagaggcatgcagtcgatatttgctgaataaatgaatgtcagataaagtggtgtggggactccaggggaaagatttgtcattctccaccctcccagttcagcttaaagcagagaagtgagaggtgcccaaaaaggggtgtgtctggggggtggggggtggggatgttccaagatctccaaggcctggattttaagcaaggtttgagatgccagcaagagggcctggcattgccagattgatagtctgcatttcagagaaggacaaccccacctctgaccttagcccaagcctcaacagcctgctcaaggagatccacccttagtaggaggaggcagccaggccaggttccagtccctgccaccgcttgccaggtgtgtcttgggcagcagttgcctttgctcggtggtcttcagctttgccccctgccaggcacgtgctggcctcctgcctgcatcgtagctcatggagtcctctcagtcacctctgtatgccctgcagcatccccagttctcagtgagaagagtgtgctctgaaagttaagtaacttacccaaggtcacacaaggtctgagtctcaaatgcatacaatttgaccccatagtctaaggtcttgaccgcaatggaataagaaattattttaccattctgagtggcagtctctgaagactacagcaataattgatgcctctcagggggataggtgtgtcacttacaggtgatagtgaggttgtcctcagcctccctgctcttcgttagacctccctcctcctctctacccgggccaagcgtccaaggcaaccctgtgtgttgcattgctcttgggggcagccagtcccccacataaagtggtgtcttccttcagctcctaacaagtcatgtggccattgcccacactacaacgacagaggaagcctcaggggaaccctcctcctctcccgaatctccgggcttcctgcatccctgggaggcaatgtccattaattccagctatgaccagcagagggcagcagcagcctggggaagacccagaggcccaggcctaggggagaggccggtgtctccaccctaggagccccaattcctccgcagcaggagcagacacacaaagaggagggcgagcaagggtcctccggggcggaacacctctgccgcacctgcagcagccttgctctatttcttcacaagcttccccatgacactgacccaaggctgtctggccactacagctgctgatgatgattagcaataataataataataaacgaaatgccttctgcttagatcatctttaatttcccctccagaatgacattcgactctgcttagagttacaggcagcccagcaattactgagcgcaaataccgtgttcacccgcctcacctcatccacgcccccacaacacccagccctgagactggctccacgatcacctccactttataaaataagatatcaaactctgaacagaacggacgtctcaaaaaatgggcatattacatttaaaccctcaatctgttgggtatttgagtgaaatggacatacctccagggagtcggtggcgagggccggctctgaggacttcctgggttgggatcctggctctgcaggactgcgtgaccttggtgagttacttcatccctccaaacgcgctgttctccttcatagaatggagatgaccacagggccagattcataaggttgttccttgtaatacaggtgaatatccatacccagcaactgctggaccacctgtggtttcaaggataatttccctcccacgtccccgtggcccttggaaccttcctctcctcctgtctccccctgcccccatcactttgtaattgaaaagtcatgattgctctcccaggtgtagcactgctcacaggtcagattgcctgctctgacgtagtgactcagttggatgcggttcagctgtgtatgatcaactccctccccctgacaaaaacattattttgcatcacagagaagttgatttctttcacacataaaagaaggcaaaaagtggtgcctaaagggctggtacagcagcttcaagaaatcaggaagaacctgggctccttctgccttcttgttctgccaatatcaccccatggctgccacttcatggcccaagtggaaccatggagcaccacccttcagacccataggtgacaacagcctgctctgtgagagtggcagtggcttccagagagacttaggaagtagaatcaacaggacttggtgacagatttgccacagagctggggaacagggaggtccaacggtgactcccaaggagctgatgtgagaaccagagctgctgtgaatattgttcccaactcctgagacagggacagtggtcccgtggctaggaagtggtaggcagtagagagtcacaatgcacattagtatatcaacattgtgagtagggcacgcagggaagaaacctgttcaacccagccccgtgctagaaagacatcagcagggcctgcaaaagccctgattaaatctcacaagtttgcacctggagccgccatcttgaattgcaggtgaatatcagcctttggtttgggctgtgtgccccagatgatggtggtcccaaattacataggccaatatccagagctgggttaaaatgaagcatttcgaggaaaaaaatgcaatgaaatttgtttaaccggtacttcaggcttttgagcacagaacagcgtccatccctccaaacacacactgaggatatacacttagccaggagggaacataaggaggggtggacaagccatgtttactaaaatctctcagtgtgtgccaggcatgttcatgtatattcaggaagaagtgtcagtatttaagatcctcggcccttgcccgagtccccaacacgccttcttgtctggagaactgtaaatcttggaaacatcttgcaaggggggacacctcacagaaggcaggcttggcatgggataaacagaatcgactcctctgcttccttctgatgcacagtgaatgggcaggtggaagcatcgttgcttaaagaggaaccaaaactccaccccagagctgctaattccttttggcttgcagttatgcagagggctaaaaaatccaacgaatcacaaatcccctggttgctaagtagaaagaatatgttttggctgctgctgttcccttccccaaggaaaagattcaagcagaggcggtccccacctctcaacacagaaagcaacatctctgattgcctctagacacaccttcatgctcgtggcactttgggaccctctgcccgctggcttatgggcatggcttccccatcactctgggtccttgggaagagcctctttcccagaccccacctctgtgcctcatcacatttctcccaggctattgacttgttcaaggttaaggtatgaagagagtcatgcagcagccctacctggctctgctctgctgggggaagccttttcagagcctgcctcttcctcagcatgaggggctgctcgggcccagtcccagaggccatgctggtcccaggggaaggtggccgtcatccccatctgtgttttctcttgcaggtaagtcatgctccagcagtcgggagggttgtgtgatgacacacttggcagtttgggagcaaaagccgccacagtaagacacaattgattcattgcctctcaaccctctgctggggtggactttcatgcgtggacttctgtccccaaagaggcttctctgggtctggaaagggccctagccttggttgggggaggcaaaggggtggcggcttccaggtaccatctggccaggaaccggctccattgtctgtgcatgtagcttgcactgggctgcctgctccaagggaggcatctccccacgatctacgacattggcttcaaagagctgctcctggcagcttcgaatggctgagacctactggcatgggatggaggagtgcagggagcttcccgggacctcgctagtcctgcctggatgctcagaaggccctcgtcctcggtggcatgcagcctcggccatttccaaactcacggcatctcacccagccatgtcacccacccccggctctgtcgcccttcccatcacctttctcccacccatcacctcacatcaaggtttcagccagcgggaaccaggtttagactccaattacctgtgcgtgtgggaggttggattgtgacatctttggagggccgggcttctgaagcgacatttgatttctggtactgaaatgtcaaagggtcctgaggcacccgctagggcagcacgcggagcatccacctgcgtgcgcatcctgggctctctctgggccacttggtgctggggacatgccgggagctggtggtcagccctcctcctgcctcctcagtgctgcatcttcaccttctgcagctgcctaccagaagcagggggacctggaaggcaaaggagagggagttggcatgtagtgagcaccgactgtgcacacagtgccagcaaggagcttcacactcatctccagcgtcacagctgcccagtggctgtggaagccgatggactgggccctctcccagtacacaatcattagagggtctcagttcactgagtaactgtgggagcagcacggtgcctccatcagcccccagttctgctttcgaaacatcgtcaccatcgccaaagcaaagcctcagacctgcaggccagcgctcccatgccccatagccgggagtaaaggacagatgcggggaatctggaaggagattcacttcaagcaccatcccactctatttgttaaacttgtgctcctgtgaaaactgcttgtgtctgcatcaaacccagctagggagggctgagggctaagggtaaacctgggagagttgaattccagtgctgtgattaaaaccaatattccacataatgcaatgtaacttgctcacatcgtcccatgtaatctttaaagccacagcccttttgcaattgggattattatctccattttacactggaggaaactgaggctctaagaggtgaaatgattcacccagttaggaagtgatgagtccagatgtggtagactgaataatggccctcacaatggaacctgtgagtgttcccttagatgacaaagggcctttgcagatgtgattaaattcaggatcctgagattgggagacattatcctagattatccaggtgggttctaaatgtcatcagaagtgtcttcataagaggaagacagagattttgctacagaagagggggaaacatgatgatgagtcagaggctggagtgacacctggaaggggccatgagccaaggcgtccaggtggctggaagccagaaaaaggccaggaaatgggttttctctgtgagcttccccaggaaaccagcctggccaacaccttgactttagcccagtgcaactgactccacatttctggctccagaactgtaagagaatacatttgtgttttgttaagctagcaaatttgcagtaatttatgacagcgctatgagaaaccaaaacaccaggattatgccccaaggatcctgatgccctccctcctctctgctctgcagtgtgctggagctcacagggctctgctgctgggagttagtatctagtccaacactttacccactcaccccccaagctaagggactcctgaaatcagggaccagatgcataataggtgcccaggaagtgagactcgccttccccagattaagaataaagaagacaaactatccacggctgctgtgagcctctcatcagacctcagcttctagggcagggtccctgcctgtctccagtatgtggcctctgtgtcttcttcgccctccatccccacagtgggacgagaagtcatcaggaaggcaggggatctgcaggcagccatcagggctctaattgcagctggctgggggaccatgggtcagggctgccaccccctggctctgtgccttcacctgtgtaacgaatggggcactcacagcccctctcaagtggtcctggggatgaagtgagaaggtgacatatacaagtgagttatacacgttcctgttctgtcactcaccagtgctcactgggtgggtcactgaactcccctcagcgtttccttctccatctgtaaaccaccagtgcaaacctttcccagatagtgctgacccgaagcaggaaccagtgcccctctgccctcagtaagtctgccagcagaggaagcccatagagggtcttgggaaatgaagccaacagagtcaagagggtcagatgatgagggacttcaagtgccaccttcatcccattctttctgcaaatattcaccacacacctacgtgacctcaggctctgtgtcaggtcctggggatgtaatggtgtccatgaagaaacaaggtccctgccctcatagagtggcctgacatatgcccgaggcagtcagcagccgagtgcgggagactcttgagcagagattgagtgtgttgatatctgtaggcatcagcctggctttgctgagtgagctatatcagagtggaggaggccagaggcaaagtccagactccactggatcctggattgaggggagaaggggctgggcggaggagcagcctgagcacctgcatctcactccaactgggtgctgatttgtccccatggccccagcacccaggcaggtcaccaagtaagctcaagacaaaaatgatgagtgactcaacagtgtctggggacaagggagggagagaagaactcaaaatgactgaggtttccagctaccagaaaaatggaaggaccttgaaacaaatgggccatcagcaggggacactggctggaagcccagagtccagtcagctctgtaaggcccccagaataggcatttgacttcaagtcacaggcatttcagcaaaagcctctttgctacagtgattatggtgaagcagatgcccacagctgagatgggcaactctcaggcctccagtggggacagagaatccctgggccccaacatagcttggcctgaagatctgagtcaggcatccaacctcttctgctcagctctttcaggaagatgtgtatactggcctctcttgccgcaagggtccaccaccttccttatgtgtgacctaaggcttctagtgctggctcagtggctaatttgagcataagcacccttgttggtaaaatgaaggataggtgtagatcagcatttcccaaagtgtgtgcttctcagaaaattaggtccctggttgtctgtagaggttacttaacaaagagactctgtagttatgttagaaataaatcttatgattaccaggattagtctctttaaagcttgtctaggtgggtcacaaatccgcctcagtcaggctttaaatggggaacagggtttaaattggatttaaacatttaaaaaccatgctaacaagaaccaaaagaaagtgagagtagctacattgatttcagacagagcagacttaaggaacattgttagggataaggatggatattacataataacaaaggtgtcaatactccaagaaaacataacaatccttaatgtgtgtgcacctaacaaccgagggtcaacatacagaagacaaaaaatgatataaatgcaaggaggaatacatcagtcaactgttacacttggaggccttaacacccctctaccagaaatggacagatccagcaggcagaaagtcagtcaaggcatagctgaactcaatgacactatcaattaactggatgtaattgacatctgtaggctactcatccaacaagagcagatatcgtatttttctcaaacccacatgggacgttcaccaagataggccacattctgagtcattaaacatacttaacaaaagcaaaataataaaaatcatacaatgtctgctctcaaagcacaatggaatcaaactaaaaatcaataacaaggagatagcaagaaaatcccaaaatacttggagattaaacaacactcctaaataacataggtcaaaaaagaaatcttgagaaattaaaaaaaaatactctgaatcaactacagatcacacaaacatcaaaacaataataaaggaatattatgaacacctctatgcccacaaatttgacaacttacatgaaatgaaccaattctttaaagtaaataatctgccaaaattcgcacaagaagaaatagataatcttaatagccctatgtctattacagaaattgaatcaataacatcctttcgaaacagaaagcaccaggctcagataggctgattggtgaattctaacaaatatttaaggaagaaaatgtatcaattctctacaatctcttctagaagataggaacaaaggaaatatttcctaactcattctatgaggccaatattaccctaataccaaaaccagacaaagacatcagaaaagaaaactacagactaatatctctcatgaacatagatgcaaaaattctcaacaaagtatttgcaaattgagtccaacaacgtataaaaagaattataagccatgaccaagtgagatttatcccagttatgcaaggctggtccaacatttgaaaatcagttaatgtaacccatcacatcaacaggctaaagaagaaaaatcatataatcatataaacagatgtggaaaaagcatttgacaaaatctaacccccagttgtgattaaaactctcaaaaaacaaggaatagaggggaattttctcaccttgataaagaacatctacaaaaatcctccagctaacatcatacttaatggtgagaaactagaagctttcctactaaggtacaaggcaaggatgtcccctctcactcctccttttcaacatcatattggaagtcctaggtaatgcaatgagacaacaaaaggaaataaaaggtatacacatagggaagggaaaaataaagctgtttttgtttccagatgacatgattatctgtatagaaaattgaaaagaatcaacaacaaaaacaaaaacctcatgtaactaataagctattatactgaggttgcaggataaggttaatatacaaaagtcgatcactttcctatataccagcaatgaacaagtagaatatgaaatttaaaacacactaccatttacattggtaaggtatatcccaaaatgaaatacttataatctaaataagtataaatcaaataacatatgtacaagatctatatgaagaaaactacaaaactctgatgaaagaaatcgaagaagagccaaataaatgaagagtattccatgtttgtggataggaaaccttggtattgtcaggttatcagttctttccaacttcatctatagattaaatgcaatcccagccaaaattattggttattagcaactattaacaaattattttatggatatcaacaaagtgattttaaagtttacagagagaggcaaagactcagaatagtcaatttaatactgaagaagaagaaaaaagttggaggattgacacaacctgattcaagactaactctaaagccatgataataaagacactgtggtatgggtgaaaaatagacaagtagatcaatggaacagaacagaaagcccagaaatagacccacatgaatagagttgactgatctttgacaaaggaacagaggcaatacagaggagcaaagacagttttttcaacaaacagtgctagaacaactggccatccacattaaaaaaaaaaaagagtccacacacaaaccttgcacccttcacaataattaactaaaaatgggtaatagatctaaatataagacacaaaactataaaactcctagaatataacatggaatcatatctagaagatcctgagtatggcagtgactttctagatataacaccaaaggcacaatctgtgaaagaaataattgagaagttggaattcattaaaatttaaacctctgccctgtaaaaggcaatgttaagagaatgagaaaataagccacagactgggaaaaaatatttgaaaaaatatatatctgataaaggactgttattcaaagcatacaaagaactcttaaaaatcaataattagaaaattaaaaatctgattcaaaaataagcagaagacccgaacagacatttcaccaaggaagatatacagatggcaagtaagcatgtgaaaaaatgctccacatatgtcattagggaattgctaattaaaacaatgatgagatgccactacagaactcatagaatggccaatatccaaaacacttaacaacacaaaatgtaggtgagaatgtggagaaacaggaactctcatcagtgcttcgtgggactgtgcaaaacagtacagctgctttggaagacagtttggcagtttcttacaaaactaaacagacccttaccataagattcatcagtcatgccctttggtattcacccaagtgaaccaaaaacttgtgttcacacaaaaaactgcatgtggatgtttacagcagctttattcataattgacaaaacttgtaggccaccaagatgtccttcagtgagcgaatggttaaataaatgatggtgcatcctggcagtagaatattactcaagactaaaaagaaatgagctatcaagccagtagaaggcatggaggaaccgtaagtgcacattactaagtgaaaaaagccaatcatgcttccaaccatgtaacattatggaaaaaagcaaaactatggggacagtaaaaagatggctggtttccagggttgtggggaggaagggatgattaggtggagcacaaaggatttttagggcattgaaacagttctgtatgctactacaatggtagacatatgtcgtaattcatttgtcaaaacacagagaatgtaccaggagtgaaccctaatgtaaactatggactctgggtgatagtgatgtgtcattgtagattcctcagttattacaaatgcatcatcctggtgtgggatgttgatggtgggggaagctgtgcatgtgcgggagtagggagtatatgggaactcttctacttcccacttaattttgcagtgagcctaaaactactctaaaaaataaagtttattaatcaacaaagaacacagtgagctgcaacttcataaccagtagattgacaagaattaagaaatttaataaagaattgattagaatatggagcaacaggaactcttacacattactgatggaaaagaaaattggtatacctactttgtaaatagtttggaaatgcctagaaaagttgaatatgaccccaaaatgacctaataatgccactattaagtattgaccctaaaaaattattgttgaacgcattttttaagagataaatgcaaaaacatttgttgcagtatcatttcaacagcaaaaactggaatcaatttaaacagctctcagtggttgaatgaataaactcattttatgcaaaatgaaaataaaaatagatatgggaacaagatttactatcaagtggttttctcaactttcctctcttcttaagaatattttattttgcctgccatcaaaacttttgttccagggcatccatggtccattgtttagtttctgcactgaacaaaggctcttgatgaaggagtgagtgggagctgaaatccagccatgctctgctccccaagccatgcatttgggtgcaggctctgtctctacccagagagaggaggcatcttttacttcagatattgatgtcatctattccccaaatccagtgcttacaagtctggatctgccctgtgggaagtatttttcaaattcatctactcagcctgagcatcattttctaactcacacaaaggcattttttagattagtaggagcactgacctgttcaccacccagcctatccatcctggtacaatcctgttgtaaccaagcaggtacccaggcctttttaatgcagcagagaaataggaagtgaggcaggagggaggcaaggtgatgtcttgtcttttctttgtcatgaaaaggtcaggaaagggacagatagagtgaaagaagattggaaaataagccagagaggctcggttgttcttcataacaaaaagaagttgggggtaagtaagagaaagagccaggaaagagagccagaaaagtcccaaaggaggggtgccctggggagccctcttgtgctttatagcatgagtggctcctgtgcagttgggagaaggaagaacatcagaggggagagaaaagggaattttaagaaatattgctaagcgttatagattagataccctttaatgtaaatattcaaattcctttttataaaaaaagatatattgaaatataattgaaatacaaaaaaattgtacatattaaacatatctgattttattagtctggacatatagccagacctatgaaatcaccacaatcaagatatgaatataactatcaccccccaaagtttcttcatgtcctttttaatcccaccttccatccctcccaccctgccatcccccacctcaggtaacactgatctgcttcccgtcagtagagagtagtttgcattttctacagttttatctaaatcagccacgcagtatgcattcttgtctggcttcttttattctgcattattctgggactcattcacgttgtgtaactgaatacttcattcctttttattgctaagtagtattgtagtatttctttgtatggatataccacagtaggcttattcattcatctatttatagacaattccaacttttgactattacaaataaagctactatgccattcacatacaaatctttacgtggaaatgctttcattcctcttgggcaaatacctaggggtggaattgctggatcacatgatggatgaaaccttaactttttaagaaattgcgaatttaggattttccaaagtagatgtagcattttatacccaccagctctccattaataaattggatttcatcaaaaatttaaacttctgctccaaaagacactcttaacaaagggaaaaagcaagccacaatatgagaggaaatatttgcaaagcatctgataaaacatgtggatctaaaatatgcaaggagaataacaactctattttccactaaggaatgaatgactgtacaaggaccacattctaattaggagcttctgaacccaaaggaatttcagataaggggaaatttaggcccaaagccaggagaaggggtgagtagggcttgatctctgcctctgaagggcagagggcgtggactattcttggctcttaggggacagctagagaaatgtgggtctcatggcgacaactctggactccattggaagaaccttctaacagtcagggctcccagagataaactagacaagtcaccaagagaggcagtgggtacccctcacaggaggggtgcaaatcaaagccaaggcttggagtggaccatattaaatccatttcttatcctgtgattcttagagtcctatctgtatcaggggaaggcaggtgggttctagaactttctaaatgtgtccctgtgggtttttccttctccagctacacacaaacttgggcctaataagaagtctatggcattaacccagcaggaatgcttaatgcttatatctgacctcaaaccaagactgtctccacagtgaacaaccccgtcctgtcccctgggcgtctccttagcaaatgccatcagtcaatggtgcagccatcttggagcccttgccatctataatcttctaccgccacccccccagctgattgttttctttgtatgtctccttcctggacattacttattctttacttttaaatatttgcttccgtaaaaaaacaaatgaatgcctcggacagatttataaagaacattcctggagaggcgggtggattaattattcagcatcctctccctttgtaactatttattgtctcatatgcatttatatggtacctatcactgcagatctcgctccatgctggagacataatttccagtgactgactacttgtctaagatatatatcgtattgcaatactattttatttctgactgtaagggcacgtgccactgttgggtaattgtgttcatgtttttaaatgtgaaaaataatcaaatataacttgaaagagattgtacagtaattcaaggggatattaaaccaccaggaagttactcggcaaataaataggcgtttgtggctgtcacgctgagcaatgaggagctggctggctgtgggggagggggagacagagagaggaagacaaagaggagagtgcagtgtgagtgcctggttgccaggttagttgtgttgggggaaaggagcttctaatggccaagaatagaagacctgaagttggctagtgcgtggctagtgcctgtaatcccagcactgtgggaggccaaggtggatgattcgcttgagcccaggagttcaagactagcctgggcaacatggaaaaaccccgtctctactaaaaatacaaaaagttagccaagtgtgatgacacatgcttatagtttcagctactcgggaggctgaggtgggaggatagcttgagcccaggaggcagaggttgcagtgagcccagattgaaccactgcactccagcctgggcaacagattgagaccctattaaaaaaaaaaaaaaaaaaggaaggaaggaaggaaggagaaaagaaaaaagaaaagaaaagaaaagaaaagaaaaatgacctgaagtcactggatttccttcgaggtagccagaaacagaggaaagggggcattgcccacttagggtaaaaagtagagcaccgaattgtggaaggctgcaggttttcatgtgtgcttgcccaagtgatgttccatgtcaggctctagggtccctgcagggacagagagggactaacatttacttacatgcctatagtatgtcaggcatatacttgtgcctttatatatatcagctctgtttttgtcattaaaacatccctgtagaaagataggcactgctgtcccattttacagatggggaaacccaagctctgagtggttcagcaaaccctgggtgcatacccccaccttgcccctgcaaaaccaacaaaaaaacgaaggccctgccttcctggagctgacatttaggttgattctgaaagtcagtaggcccagattttcactcttcatttttcttgtttggaatgagagagcacacagctgggtcgggggaaggagcgagggtctaggcctgcatccactcaccccaaaggaaaggagtaggggaccagtctgctggacatgcagacagcgattggagaaaagtcagcccagctatgaaccccattcctttcagtatgagccaagagggatggcatctgtcagagttgctggatttgggattttgcatcttgccaagtgtccatgaggaattggggaaactctccccctggctggactgaggcttcagcaagcattgttgctgcccagtggtgatcagctcagtgtccttggaaaagagcagaaagtggtatcacgaacatatcttctcctttgcttccttctcctcactcttcatcatcatcatcatcatcatcatcaaatatggatctgtgaggctacctctggggttgaaacttggttttgggcaaaatttgtgatgttctctctgcccaatccagcctcaggctacaaatgaatgtaaaaatctctaatttagtgccaagtaacagaaaacagctctacttatcttaagccaaaaagagggacttctcagaggcatactaatggaggatggcaagagggcctcacgtggaaccagggcctggagcggcacagcattcaggaagctcagtctccttctctctctctctctcatctctgcttgtttccctttacctgtagacatgctatcatttttccaatatccatggcagaatgtggccaccagtaactccaggtgtataacagaagcctggcctcccaggagagggtgacttgatgcccttagctccagccttccactcccaccctgggccaagcaactggtggccaggaggagctcatattgcaggaatattgaaattttcactaaaatcatttgaatcgaggaggacatttcctagaaaaaagggtgctagtctgacaagcccacagtggtccccttcatctggcaattcatcttctgcaaaggtcacaccatccttttcgctttccaacctctgcaccagtgcccaagtctgtcactccctcctctcattctgaaacatcctctgcactccattcaccagtgccaagccttgcccttcttcagggttcaactttgtcccaccttctctgagaaggctgccctggtccctgcaaccgctatgagctgccttttctgagctcttctgctgtggaggatccatgccattgacctaggcacccgttttccacatattgagcattgctgagcacctattctgtgccaggcactgtgcttcagggccatgggggatgctccaagcggtaaaatgcaaccaaagccccgaaggagctcacattctagtcatgtccacaaagaggtaataaatccataaattgtatgtactattctagtcacaataaaattgtgtcgtactgtaatgctgggtatccattttaaaacggggggcatcggctgaatctgggtcattacagtaggaaatgcatatatataatcatttactcatgaatattaatgtatttaatgagggtaaaagatattacttaaagcaaagtattcgttccagctactgttggatttgttcattactgtttcccatgcagatattacctgtgatttacctgcatatcaagcatctggaagtagctcaaatccacctgtgggtaaattaggttagccatttgttggcaaaaattacagtgttaactaatttccagggtatgcttgcagtcagtagtttcatacttaggtacatgacttgcattcacatcatctggttaatggtgtgaacagagattttctttatggtttttggaatacagtaagataatgttaagctaacgtaagtctgttaacagtacctggttctgaactgtatttataaggtgtatcataaaaccattactttggagtttgccaatcttaaattcagaacaattcaaaaatgagccagaatctagtttgcatcattaccacttataaaaataaggatctgtaagttggctggataaaatatattacaaaataatgacttaagtggctctggagccagcacaaaagataaaaattgggtatactcaaaattaccttcaaaatatcttaagtcattcttaaaatacatgtaaatatgccaactcaaaatacatccaacaaaactaatatttttcccaatttgttggaagaaatttctctttctttagttgtgcattagatgaggaagtcagagtgcattaatattcggggccctgttgtataaaaatgacagattttcaatgtatgctaatatgcaggtcacactcggcccagtgagatgcttgcctagaggaggcacgtggaagccaaggccaaggaaggcataattcactctggagaacttctttagctggcaaagctcagtttctccccggatcccattttgctctggttgaattcgcatgcaccaaaccaagaccaaagagtttatgatgtggttcccgccaccgttggccaatagcaatttctaggcccaccttcaccaaggcaggtcctagatgtgttgctaggcatttggagtttactgagatctgcaaagctgacttcttccccagtttcaggtggttcaggctgttcttgcctctccttggtgtgtcagagtagaggagaaatgactttcagtgctgggaccataaccctgtttccactccacttctgacttgcactgtgggctgagaattgacattctgcttggggaaattttgttcccccaaccgtagcaaagtttaattaccatgttcccgctgtggggggaaatcctattcaagaaaccagcctctctcaaatcaatcagtcatcttgctcattgaccaatggttcggccacccggcaagaaattagaaaaatctatgcataggagaaagctttccaacagccctggaaaggccttgggccccaaagggctagtatgaggttgaggtgggggagagcaagagaggacaaaacaggctgggtactgaccttcctcgtactccatggctcagaactctgacctcttgccaacctgccttccgcaagcagcgagagtagcacggctctgaggggcatggccagggaggatgtgacctctaagtgctccaagtcactgggaaccctgttctaataataggcaaagcttcagttgatggagtgcctatatgggcccagccctgtgaacagcttcctctcagttttcccagaatgaagctcagtgcacacactaagtgtgcaagaaacacacaagaattaattgcaattttaagtccttgtgacaatcccaggcctgcatctgcagggagttttatgaaggctgtttatagaattgcgggaggggttaagagaaagacaagagagtgtgaaatgccccagaactagtagcaggaagctactaccatccctgagcctgaaggacagaacccagagagacagacctgtgctgtaggtcagggccccccagtgtgagcctcagctgccgctgccagtccccaactcaacaggagagagctggacaataaagaccctgtgagcacccacaacttcccattggctgcatcctgttagaatctagaggtcatgggagcctgggagaggccacccatgaagatcagcttccaggggcagagagcagagtggacatggaggggcaaatggggaccgtccagcacagtcaccatctcatagacattttcctccacctcctacctcgagtagccagtagggttccagccggactgtggagcatcatcccaacaactgcatggctgcttcccactgtccctttaacagcgcacatgggagggagccacaggtcagcaaggcccttggctcccgctgtggccctcacccatgcccatccccacccgtccccatgctcagcacatcagcttcactctggctgaccatgtgcacagacatgactcagtaagtctgtcttttcttttcttttttctttctttctttttttttttttttttgagactgagcctcactctgttgcccaggctggagtgcagtggcatgatctcagctcactgcaacctccacctcccgggttcaagcaattctcctgcctcagcctcctgagtagctggaactacaggcatgagccaccatgcctggctaatttttgtatttttagtagagatggggtttcaccatgttggccacgctggtcttgaactcctgacctcaggtgatctgagcacctcgatctcccaaagtcctgggattacaggtgtgagtcaccatgcccagccaactcagtaagtcttttgaatgtgagcggaggcccccactcagcatttccaagacctgggaaatgagggtgaggagggggccaagagctctgatttcaagtcccagccctgccacccattccttagggcaggcacccaccaccgccttggctcaggcctcagtttccatctggaaggtgctggctgccttgatgggcctctatgggccctccagctctgtggctccatgtcaaatgcccctgaccacccttgagattaaccctttcccaaggatagacagcttcccccatcattctagatccctcacacttccccagctcctacggaaataacctatcccatcccctaagatctgcaactgttgagggtaagtttttggttaaaaagagtgagacagactttggcgctagtgcaaaacaagctgctgctgtaagagtgcatgtgtgtacctgcagactggtgcaatcagatgaccttcccaccaggctgcacagcactggatgtcctcacagtcactcagccactcagcaaactttgactgcacagcaacccatgccagacctgctgctggactccaggcatgttgagaaatgaatataatacccaggctatggcctcaaaaccttcaaaacccagggcaggacacagacagggacacagatgtgatacctgctgggatacagtcctcatgaggctctctaagaggtatctaagcagggacctagagggaggaggtattacctgagttgaacctaatggaaaggcattgcaggcagagggatcagtataagcaaatactcagaccaaaaacaatggcatgggggactccaccaaagaagtaaaagagaatagggtgctacatggtgtctcagtcccttttctgttgcttagaacactgaaactaggcaatttataaagaaaaggaatttatttcttatggttatggaggcttggaagtcccaggttgagggagcacatctggtgagcccttcttgctgggggcaggtactccctgcatagtcccaaagcagcataaggcatcatatggtgagggggctgagtgcactagctcaggtttctcctaaaaacccaccagtcccactccccaaataatccattaattcattcacccacaaatttattaacctcttaaaggtcctacctcgcaatactgccacattggagattgagtttcaacatgagtttttgaggggaaaagtattcaaactatagctcacagagatcgcttttcctagagatggcagatgaattttggaggtagagggagaggggcagatcacacagatctcatagtgtgtacaaacctgcccttcctgccggtggtgggcagctgaggaagggtctgtctcatgaaccattaaggctgcagagtctagcacagcatccaggccacagcaaaagcatgagacatacttggtgagtgagcaagagaatggaagaagaaatcaatggagccaaatgactccaccagatttgcatttgagacggtcactgcaagactgcaccagtcccaaattcccaagacagcaatgttttccacgatgggtctgaacatgtaaccattctcaggttcctgttgggggtttgggagcctagaaactgagacagcctcacagctgacagatcacgagcagccatctaagtcgacgtttccaaagtcatggggcctatggtttgtgagcttatttaggttgtccccgggcccagcatcaaaagcattgagacacgtactgagggactcttttcctagcctctcagtcctgactgctcaaggaccaagtggtacttcttgcctgcgttcctttaatgcttgcctaatatgagctagtcttctctgatcacttttttttttaatccaaagtaggtgggcattgtcccaagagcctttggaaagcagctgcctctcactaggacttcacagcatcattttgctttgctctctttgtggttaaaattaccttccattcgtggtgggtgtatgtcaggatccccacaagaaacagagggacacccaaattagggacatacttcagagggactaatgacaaaggcatgggtgggagtagaggggaatacaagggagacttcaagaatcttggcctttattataaatgcaatgtatgtccactatggaaaatttggggaaaaaagcaaactagaaagaagaaaaaccacattgcctgaattcctactgcatggagagaagcatcataaacaccttttggaggagtctcttcttcctttctccctttctccttctttgtatagagaggtctttcctgaggacttcccagaatcttgcagatccaaaatcttaagaatttgcagaggcagtgaggagttaacatgcacagctcagggaatattctgctttttatctggaaccaggctcggaacaagactccttgcttttctgtcctgtgttttcatcttctctcagaaccctaactttgagataagatctttgactattattaggcgggtgcaaaagtaattgtagtttttggcattatttttaatagaactgcttctgtgtcctcagatctccatcgttcatctcctgataagtccctgaaaatttcctggccccttggagctccttccaggagtagaatgatcacaagagctgccatgtattgcttattctggcctatttccttaggcacattagcccatctaaccgtttccatggcccacagaggtgggaggagcatgaagaaaaatgcaaggaaataagctcatctcaaggtatctctggctcccaaagaacataggacattaccaacttgaagttagcttctcaggaaactaagacccagctgcttttcaaatcctcaaaatattagtatgaattatagatatagttatagccttcagaacttctggcacagcccaaaactgttggctgtaaaaccatgtttcctaaattcaatcatgtttctcattgatttccattttgaaattggaagtctttgccctcaagatataataaaaaccataccaaagaaaatggaaaacttttcccccttaatatttaaaggagaatgatttttataaaaaaaaaaaaaaacattcatttgtctacttaaagtaaatcacagtgcagtgccagtctgggtttggagcataacactttttttgatttatggtttctgccaggagacacccagctaatgatatttgttcctatgtccttctctgactagctgggtggcagctaaagagctagggtgaggggagaccagaactccaggcctgtcccatgttcctgtctcacccatatgtggatttcaaccctgggcttagtgtctgcctctagcgacatgggaagagagggatgggtcctctccttcttcttgtcaaatggcccccagagtcccaccaaggtggagctccaggctcctgaccagcggggctccccaaccctcctgctgtgcccagtctatccctccttccacgcccagcagagctcagcagacttgcccttggccactcttgtgccttcactgctgtgtgtcctggacaggagccagcgtgggcttgctgatcacagagaaagctcacgtggcaaaagaaccagtgagattaacaagtcgaggtttgggatatatcttagagatggagccaatggggcctgcagaggatttccctggggactggaagggtgaggaaggagaatgctctcagatgacacctaggtggctgatgtgatagaatgggcattttctggaagatctgttcaggggcatttggtgagacagaaatcaagggtttggcttgggacctgatatgtttgatcaccctgtcagccacccaggtggagaggttgaggagatggctgatggcatgggtctggagctcaaaggagaggctgggtgaggcttgagttacacatttgagggcatccatgatgtgaagcacatgggggggcccacacaggggtctgtgtgttcccctgtggtgtgtgtggggacacgtgagtatgtgtttctgcgtgtacattgacatgcatgactcagaatgtcacatccatcacaatttcctgtctgaccttggctgaggtatgtctgagttttaatggcctgtaaaatgagggggtgatattagatggcatctgagacccttgccaactccacaattctaggagttggggaatcccaaagatgctgccatccctggtttgtttgggtgaacaggaacagagaagtcttaagaccacaagcagtgaggttagatgcgagttctgcacctcccctggggccttcagcagctgcattcttggcccagcagaggacttgcctgatctccaggatagcaaaggagctgaggccaaaaagacacatgggctactgctcacccagccccatattatacccttttcatcgctgcaattcaacataaaatcatatcattcacacctacccactcatgcattcattcagcacatgctcatttttgaaccggcaaatatatattagatatcgatgctgtgctgaatgccacagattgcaacaggaatcagacgccaacctgtcccggaggagctcacacatctttccaaaaccaatttctacttcttgggtcccctctcaatgtgtacaacatagagctttccttgcaaggctcgagcacaacgcagcagtcactccttgtctccaggcctggctgtagacacaatggaggctcctccttgccatctgcactccagtcaggggaggacaccaatccactaccaaatgaccatagccagcatttactgaatgtagacacactgtaggtagcagatttcaggcacccaatccaggtattgcaggaaggtagcttctatttttctataactgaacttgacttctttcttgggtcctcattctgctgggcatggatattttagttttagtttatttggggtaagctcagccagtgcaaagagtttgcagtctaggtagggtgttctttcccttctcttcccactagagaatttataaggtgccctggcactgttgagggaggagctacccgggggaggaatgaccctccgtcactgaaggctgtgctggaatcacatttcctctgtctccagccctgagtccaccaaagcatccatttcttccaggtttaaccacaaggcctttccaagactgcccaggtctccgctcatccttctccaggagatgctaatctctcggagaatctcctctccaatctgaggactggggcctttcctgccttcctgccaccaaacaggcctggagtggaggagagccagaagccttgccacctccccaggctacatccaggaagaggcaccaagcccacttgtcctgaatctcaaagcctacttaagagcttaggttctgttgtcacaagatcatgggcacaagccctcgcctggttctagagagagtggggtcagaaacactctcagcatttgagtctctttctcctcctctgtctatcctcctttccctctggcccagagaatcttcctccactccctggagaaaaacctatcccacacaccctcacatattcttcaagatctattggttaaggcatccaacttattgcttaagcatttcaaggactggactttggaaagccaagaatctgagttgcaaagtcttccttaaaactcaaaaactgggctcataggtgctcttctctttttcttggcatttgcctaaaagccaccctgaggacacctaggagaggccacctcaccacttcttgaaccaggcatgggggatggggaagaagacactggggaaaagctctgagtggtacttcagatcatcctgcctcaggtgttggttctgatcctctcaacgactcccaagggaatatgtcagctccattttgcagactgaaacccgagtctcggaatgacttgtccatggtcacacagttgctaaacatctgagccagagtgaaactctggggtatttgactttaaagtcccagcctttaaatcatcccacacttgcttattccaacttggacttgccggagtcccatagacagaggctactctcccaccgtgctgaagctggtgcatgccatgtttcagtaagagaaaggagggtgcctgggcttcgtctccacccaggtgcctctcccccagcagctgcaccaggccagctgagggggattttagcccgaatccagggtttctcctacagaagacaaggagtttgggcactgccagaattagaagaacagaaagaaaatgttctggatttctcatcaaatgcccctagcctgagaaatataactaaattcacccttaggtcatcttacaatctgtcctgccccagtgttccccactcagggaactgctccacccacatcctggtccccaaaccagaggcctgggagtcacccttgacatttcctcccctacacccctaatcaatcaaatcctgtttatcctgccctctgagagtctgcaccgaaatctctctcctctccttcccacctaccatggcccagcagctttaccatcatgtctcacggatctctgcaccgctcccaactggcctgtgcgttcactcctgccccctcctccagccctgtgtacactcccttccaccatcctttctatactctcctcaatcctatctgcaccctccttcaaccctgtctgtactctcctccaatcctgtccacacactccaaacaaagtcatatttccaagacaaatttgaccatgccactttctcccacagctctccaccacctccaggatcccatcctcagtgttagccagacactcccaaggccttgtgatctgccctgcctatgtctccagcctcatcctgcaactccccctacactctgtgttctggccatcaaaccaatgggctcctcttcctgcacccccatccactcttgcacatcctgcactctatgtctgaacagctcggtttctcttcttttcttctggcacatgtctgctctacctgcaggtcatcttagatgtcacttctcctaggaaggctttcctaacctccaaaacaggctcagttcccctcttcaattctcactgagcctcctccctagcatttccctctctgcattataattcctccctgtgcaagtgctcatctccccactgcactataagatctaggagggtagagtctgggtcccattcgtttctgtaccctcagtatttagtagagatggggtttcaccatgttgcccaggctggtctcgaactccagagctcaggcaatccacccgcttcagcctttcaaagtgctaggattacaggcatgagccaccactcccggccctctgcattcttctatttaaaactatttattgagatctactattggctagatttcggggatgaaaaaggcagacaaggcgccctgccctcaaggggttttcagtttagtggggagcaaagcaaaaagacaaacaaacagttaaatataacatctagtagtgataaatactccaaagaaaactaaagcaggggccagagagcatgggggcattgatgttttagacaaggtggtaaagggaggtctctctacagaggtggtatttcagcagcagcccgagcactcagtaggtccatggtaaaatttagttgactcccgaactaactgagtgtctcactcagtgaaagcctctaatccattttgctagaagtctttccctgtagctcattttgttccaagtcacaagcatcaggcttggaagacctgtgtgggagagtaattaacctaatacacagcgcggggaatggaagcccgaacccccagaagccttttctgcaaaaggaccagggcttgggtaataaaatggggctttcattctcattaatggggcaattgatttaaagaacagacccagtggcttattgatcagtgttaatcattagaaaatgctgacttaatgaatctaactgccatgaggcccctgtgggatttgggaaggccagttagatacaataactttgtccccttccagtccagcagacagatttatttacagaaatctggattttttttttctggaaaaaaagtcaaagagtcactgggggttaagccatttctccagctgatctgagagatcatcccaagcctttgtaatacgcctgtctctcctgccatgctctgttcctatctagcttttcaaaacaaactcttcattttagaatagttttaaattatagttagagaaaaacttcaaagatagtaagagagttcccatatcctgcacacctggtgagccccattggtaacagcttaggttaacactgtcaccactaatggacaaatgttgcaatattattatttgctcaagtccatacttaactcagacttccttagtttttacctgaagtcctttttctagttcaggatcccacattccatttcgtaggcatgtctccttagactcttcttggctgtgacagtttcttaggcttccctctgttttgataaccttgacaatattaaggagatattgggcagatgactgtagaatgtccctcaactgggtcttatctgaagtttttctgatgattgcactggggtttggggaggaagagcacagaggtaaagtaccattcacatcacatcatttgaagagtgcatgttatcaacacgacctatcactgctgatggtgacctcgatcacctggctaagattgtgtttgtcaggtttctctgctgtgaagtcattttcctccctcccctcttacacactgggctctttggaaggaagtcactgtgtgcaactcacactgaaggagtgggaagttagagatcctccttgagcgtgggccatcttcatgaattattgggaattattctgcataagagatttgtttatattaatatgagctcatggatatttatgttgacactttgggttataatccaatagtattttacttcttttcttgctcaaattactccacctttgggtactggggctcttgcagttggctcctatgtccccgtcattgaggggtttgggttttgtgtgtgtttgcgtgtgtgtgtgtttgagcacttctttactgttggcaccaaaagatgcttaggcttgctttgagcatctcctgccctggccctggagccactccaaggaacctccaagaacgcctgattccttttattactggctcctattataattttcataatgggctgtcattttgttttgtctggttttgtttataattataagggtaagtcagctcattgcataaaatatagcaaagatataaaagaataagaatgaaaataagtatcccaaataatccaagcagcaaagaaatccagcgttaacattttggggtattttcatctggtctttttgctagttgctggctcttaagaagtctgtgctttcattcttgatctctgccagaccaagggatatcatgggccctggtttacctccctgtcccagcatctgtggttggagcagcttccatttggccatcctcaggtggtctgctcgctgggcccctgcccacttctccctccagcagaccgcaggccaagaggccaggagccagggtgtgtcctccagcagactctgaggaagtgaatacatcactgttctgtgacttccaacgtgatagttggcctcattttcctcttctttacgaagtaaatgcgataatatatacaaagtgctcagagaaaggcctggtaagaaacaggtattttaaaaagtaaaaactgtcggctgggcgtggtggctcacgcctataatcccaacactttgagaggccgaggtgggcggatcacgaggtcaggagtttgaaaccggcctgaccaatgttggagaaaccccttctctattaaaaatataaaataagctgggcggggtggcaggcacctgtaatcccagctacccgggaggctgaggcaggagaattgcttgaacctgggaggcagaagttgcagtgagccaagatcgtgccattgcactccagcctgagcaacaagagtgaaactccgtctcaaaaaaaaaaaaaagtaaaaactgtcattattataaccataattactattagcaatctgaagaaacacatatctaatgatagaagttcaggcatagtgtggcaggcaggcccctgggagggatgaatttgcacaagcaaactgccttctccatggagacctaatgaaattcatccggtccttcttgagagtttgactgagttgggaactgtgtctccaccagaccagcaaatggaagagaagtttcctggggctctagctgaagagtgtgtactgaggggcagtattgcattgtggttgagaacatgggctctagagccaggctgctcaggttcaatgcccagctccatcacttacctgctgggcagcagcctgagttatttaaacctcactaggcacaatgtaaggataacaatattgactatcccataaggttgctggggatgccaaataagttcacaaatggaagaactttacacagtacctagcacagagtaagcagccaattaatattactcgagttactgtttttattacttcatcattcgggactcttccggttgcaagtacaaggaaagccaacccagaatcacttaaacaaaagggaatttattggctcatgtaactgaacttcaacattttacagaatctcattggctccaatgggctcatacgtccatccccaaaccaatcacagtgactgagggattatccaaggatcacactggccactttcacaggttttatccctaaaggaaatcacaggtaatagatgtggggctgcagaaatgcaacatgcacttttccttgaaactgcatcccttttccctgaagatgaagcttgaaagaactctaagaggttaagcatggagctgatgggcaagccacaggcagaaagagtagctgtgcagccaggctcctggccagggagggcagataaggaggggaggcaaagtttggtaaacaggaagctaatctatgggcaagaatcattttcttcagcatcctgacctctcctaaaatgttctccactggtccctgctaggacaaaggaattaccaccagactagagtcaggagtcctgggctggttctgctgtatgacacaggacaggtggcttgcctggtctgggccacagcctcctcccctgttgatgagcatgttggttgttccagcaccatgtcagccctagaaatctctgaattcttgaccagatcagtaattgctctcttgcgtttacttttccttcaaataaagagattggcatacaggggaggagcccagtacagacggcatgcttggctcaggttccagaacccagaaaccagacaagagttgggaaaccatgatggtggaggagggtgtgccactccttactagtgcctaatctcttcgagacactaatgtttcagtattatccacagattctgatgccaggcagcccagatgactggggtcagttattagcatgcttcctggaggtggttcccaggtgcaggctacctgcagtctggctggatgggccctgcaccacacttgcttctgggaagctggttttggggttgccacaatctctgaaagaatcactaggccaccctctgagtgggtccttctgtaggaattatggataaaattgttccactagtcttaccttcttggggaacccttcctggattcccaggctgggctgggtgtccctgcagcctagccccacagccctcctgcttctctttctcatcacagtcttgttatctctaccaactgtaggcctgccccactgatggtgtgaataaagggactgggtctctctagcacctagcatagatctgatacatagtgggtgatctctattgaatgaacgatgaatgaatgaatgaatgaatacatttagataattcagattactctttctagctcagcagtgtaaagcaggaagacatgctgtcaatatgatttagggcaagttttcaaatctctctggacctcagttttacctcttgaaaaataaatataataatttgtccttacttcatgagactattttgaagattaaatgagataatgtatacactactactcactgtccttacttgaatattcctaggtccttggtgctacattaggctacatagaatgtatttaaagtaatagagtggtatttaataaatattcattttctttccccagaactaccttaaattaatttgttgaaaggacagatggatggatggttgatggaagtagcaggcttccagcagcaggggatggagtgagtgtgtggataccgctggatcagcagaaggttataccattttagagtaactatctcggacttcggagagttcctgggtatgaaggtttggctttaattaaagtctcagcacagtgttaaatgccattttattttaggtcataattaacactaatgagatgagtggattacaaagagcacacattttgagaaagtgaaaaacaacatctgagcttggtggtttccattttcgcttttccccctcccatgctctgttcaattaaaagttttgagaaaatattacaaccatactccttgtctttgtggtaatgaagcatattaatttgaatgtgatgaatacaatattccactgacttttttattcccttatctacaaaagtttaaaataatggaccaattaaaccaggagagaagaatgcagggtttgcctggggatccaattcagcaaccagagaactgaaagaacaaaattttttgacggagtctgggccagacttcatcccttacctatagctgacaaacagtaagtcaaattgggcagatgtggaccagcgcagaacacatactatattgaggatcgaaaggccaggttccagaccgtcctctaatattttcttagtgaatatttgttggatgaatgcatggatgggtggatgaatagatggatggatggacagatggacggagagagagatggatgaatggattgttggatgaagttgaaagatgaaggtagatgacctcccatggtctgattcttcctaaggtagcaaattaagcctaggatgggctgacctaacccttccaaggacttagaagtcagggcaagaacttacagggaagggttcagttctctgacctcactaccctagaggcataaactataaattatagagttggcctgagctcagtttccctgggagctctgctctaaagcagagccccttgaccctgcaccaatttggttaacccgagtaaggctgagcttcccccagcaggagctcctgctttggaagagaacatcctgggccaggcgcagtggctcacgcctgtaatcccagcactttgggaggctgaagcgggtggaccgcctgagctcaggagttcaagaccaccctgggcaacatggtgaaaccccatctctactaaaatacaaaaatttagccaggtgtggtgatgcagcacacctgcagtcccagctactcaggagactgaggcaggagaattgcttgagcctgggaggtggaggttgcagtgagctgagatcacaccactgcactccagcctgggcgacagagtgagactctgtctcaaaaaacaaaaaaaaaaataaaaaaaaaagaagaggacatctggagcaggcctgtgaacctgacacatggtccaggtgtctccctgaggacttctggaagtctccccacctctctgtggtcctttaggcattaacaccaccttgtcactgtgtcttctgaggcagtctggaagttcataccccacaatctctgtgtaccttgtcccccattctgttctctgcattgcagatggtttaaaacacacacacatacacgcgcaaaatgttgttccttttcttaaaacccattgtggccaggctagacaaatccttaacacggtctacaatattctgcatggcatggcccctgggtgcctcccaacctgatctgtcacacaccacctccacctttgcctgttccctgggccctagcactaacctttggttcattcctagacaccttttcagcacttaggcccccacagccctcagaacctttacacttgctgtctcttttgctttaaatgttcttgccccacctaccacctagttaatgccttttcctccttcagctcttagttgaagcatcacttcctcaaggagggcagccctgatgaaactcattatgcaaactccagcctgggttgggccttatctttatgctgtcatggccctgagtattcttcctttatggcaccaatcacggcttatatgatatacttatgctattatttgagttatgtctgtctcccccagtatgccactagtattagaatcattgatttttaatcattgtatccctagtgcttagcacagagcctggctcataatagatgcttaataaatatttgttgaataaatgaatgagtgaatgaataaatgcctcattcaagagctttggctctttctgtactactacattacttctattttttagctcttaattctcaaagcactttctttgtgctgggcttatgctgggagcttagacagtaaagcttagatggtaaactacagttgctctcaagcagttcacaatgtaacaaaaaagagacacaaatacacagtgacaatacagtgtgtcgagtgctacaatagatggaggggtgcagttttatggatgtggagaagaaatccttctattcctcactggaggcttcactaaggagatattccctaagctgcttctggaaggaaaaggtattggccaagaaaataagggtggaggcagaatttcaggtgaaaggaccagcatatgcaaaggctcagagggcagagcctggcactggaaacaaaatgcaagtcacttcgtggactgagacctggatgaggacatggggctatgagagatgaggctggggagggagacaggggccagatcacagaggcctttcaatgacagcaacatatggcagctgcagagacagcatggaagggactggcatggtgagacctgtgatatggagaactccctctcgaaggggttcagaaaagagatgtccatatttcaagtgaaggacttcctcccctggagaaactgaggctctgccccagggctgtccatcagactccttcccagaatccaaacgcttccaaaggatgttcagtgtggctgaccttgcttattcattgtggggagaattaatttcagggtggagaattttaaaaaaatataagattaagcagtgtaatcagctgctgctgagagttgcaaatgcaataaataataatagcattgagagctgtttttaataactcaccagtgtaatttagcctcggcttcttagagcatatttaaaatatgtcatagtgtgtctaatggcaaatgcctcattgccagcctctgaagacaaatgtcttcccaggagggaggggggcagaaaatagaggagaaattggaggatttgattgcaaacagggtgtaggaaggcaagcattgttcattctgacaccactaattcaaaatctgtgatctttgcctaggcaataggttttagttggtttgtcttcaagggtgaaacagatggatagcaataatatggtaaaggagatatttataatttgtaagagaagaggttgttttcagaatctatagaatcaccattttcatgcagtccatattctaattacagatcatcctggactatctattatagcaggtccccaggcaactgatatcttgacaacatttgttttacttagttgagttactaaatattcatgataccatgaaaatgtgttatttaaaagtgttcgatgaattctgagttttagtaattcatatgtgctgtccccgcccaaccccgattagtctaaactggtgagatggggctaggagtcctcccctcttgggtaacagacttgacacagttaaagtgagacaaactttggagtcagacagacctgagttcaaattctagttctaccacttactagctgtgaccttttgcagcttaaacactgaggctctattcccgatctgttaagtgagagtggtgatgatgacgaccatgacagctaatatttatggatcgcctattgtgttatctccaacacaacgatacagtgacgtaggtctaccatggttcctgtttcacagatgaggaaacttgaagcttagcgagctcaagtaactttcctgaggcacagggctagtgaataaccactctgggacctagtatctgttctagctggtttcaaagcctatgctgttaagtgggctctgatactatcttgtacagttgggggaagatttgagaagacatgtgtaaggtatagttcctggtatgtaattaggactttataaatatctcttatatggaaggactgaatgtatcttcctgggctgtgtcctcgcagggagatataacatctatgtcactctcaacgctttattaatgtccctgtcactctatacccttgtccaagttactccacaccctccaaagcctcaagtttttaatctgtaaaatggtggtgggcggaggtggggagtgagcgctcttacacatactactaggttgggggtaaattagtaaaacaactttgggaaacaatttggcaagacttagtaaaaggtgcatagatcctgtgacacagcagttttattcctgggataaatgctaaagcaggttgtctccatctctgcactactgacatcctgggacagatatttcattgtgatgggggctgttctgggcattgtaggggatttagcagcatacctggcaatttattcccaagaggaaagcaatgaggaaggaaggaaggaaggaaggaaggaaggaaggaaggaaggaaggaaggaagggagggagggagggagggagggagggaaggagggaaatatttaatagttaagttacatccacaggtttgattataaatgtgtgtattgaattggaatttctgttgaaattctgatcccttctagacaaagaaggtaaaaattgaaacatgtcaatggatatctaaatatcattactcactggctttatttgcaaatggctttccattgacaacagttacattttgttcaaagcaacaaatgattggcgctgacaatccacaggaacatggtgcagtcattaatgaatgtgctcattattcctccctgccgggaggcatcgactcccgttctccagcctgttttaagcagacagacctacatctgcacctgtcagcttggaaccctagtaggggagggggatgctgatgtgatggagaatgaagaatgggccctgcaggctgacattttgggagagtaggttctgaaatttatcccaaaggacatggaatcctggaagcagggttcaagatcctcccaaaattgatctcccaggatgcttggaatgattgttccgagggttttgtaaaatgccaggggaaaaccaggaagcttctctccagttgtcttgcctccttcctctccagtctccatggagctgactttgagaattaactcctgagggacagagaccctgggatggagagccagccctgctggattccacaaggtgctgcttaaagcacaacacctcttcccaatgacaggttctgaaagaaggccttgtagctagatgcacagagggttttgttttgtttttttttttttaacctttcagcatctgtctaaaattgctctgggctgggtacagtggctcccacctgtaatcccaacactttgagagctgaggcaggaggatcgcttgagcccaggcgttctagaccagcctgggcaatatagtgagatctctatgtctagaatgttttttaattagctgggcttgctgcctgcacctgtaattccagctacttgggaggctaaggtggggggatcactcgagcccagggggctgaggctgcagtgaaccatgattacaccactgaactccagcctgggcaacagagtgagaccctgtctcaaaaaatatatatatataaataaataaataaaaataaatggccaggtgcagtagttcatgcctgtaatcctggcactttgggaggccaaggcaggcggatcacgaggtcaggagatcaagaccaccctggccaacacggtgaaaccctgtctctcctaaaaaatacaaaaatattagccgggcatggtggcacgcacctgtagtcccagctactcaggaggctgaggcaggggaatcacttgaacccaggaggcggaggttgcagtgagccgagattgtgccactgcactccagcctggcaacagagcaagcccccatctctaaaataaaataaattgctctgtaagttgacaccactaaaaacatcattagtagttgtaataattaagataaaggagaaaactgtgcagagcccagcacagtgcctgctccatggaaaatcctaatgacatttagtttccctctctttgcccccattttcttatctataaaacagaaataatgctgtatcctaactcaaaagttgattatggagagtggcatagtattgtttcaacaaatatttattgagaaactgcaacacgcaaatagatgtaaaaggttgaacagaactttgcaaattaaaaatcctaaaggacattttagaccttatgaacttcctaataggtaagactttttaatctatctgcagtgtccaacaggtgcaagagcttgggcggactgtgaatatctaagaaaagagagagagcagaaaggagggaggaagatgaaagaaggaagggaggaagatgaaagaaggaagggaggaagaagggagggagggagcgagggaggcgggggagggagagaagggggaggtagggagggaaagaaggaaggaaaggaaaggaaaggaaaggaaaggaaaggaaaggaaaggaaaggattacaggtgggagggagggaggaagggagatatcattattattgtgcaattgttatcattatataactaatttaaacaaacccatcctgtgcccacaaaagggcaccaagataaaggctaagataaagaacacacgaatcattttcccattttcgtcagtgatgggaatggtaatgattttctctctgaaccataaccatcttgcagttaaataattgctttctgatagaatcaggagctctgagatggtgctctgaggagttctttcatttctttcgcaccttttaaagaaaagaaaacttcaagtgcaattattggcattattttaataccgactgcagcagaacattctggaaaatgaggcccctatcaaattagtttttccaaatgaggtttagacagtaccttaccaggagaaccactcagaaagcccccatggcagcagcaagccctgttgagtcaagggcacatggatgtcacactgcacatgtgttttcagataactaagtgaactgctccgatcttgtgggtcattgcaccacggggcctctccatttacttcaggttacacagcaacaagcaagctgagagcagcagaagtagctagctaaaattgcatttgattttgtgactgctagaggccaatactcaagtgaagtttaagcaaaaacaaatcatactcagctgaaaacatttgcctggaagaaagatctgtggctggagaattggagttcatgcacccagcaatttccagaggaagtctgattcccctacctgaagtaacactccttcctctccccagatccagatctccagactatacgtactcaatatatgacttgtccatggggcccagctgagcattattgcctctagcttatggttaataataacagtaataattatactaatattattctttctatgcataattactaattcatcttaatctcacaactctatgaagtacatactgtgaatgtctctgttttacaggtgagaaaacttaggcacagagaagttaagtaactcatcatagtcacagagctaagtaggaggcagagttaagagtcaatgtaggcttctgacccagagattgtgctctggacctctgtgccacactcccacttactgggtatcagggactgtgctgagcagtttatggcatcatctcattttgttattgtaacaaccctatgctatgggtatcagtattattcccaggtaaggaaactggctccttttggagcttgagtgacttatcgtggtcacacatctagtaagtggcagagataaaattgaaacccagagctaaaattgtttggcaaaaacttggcatttgtgattgtgaccatcttggtttccaagacgcctgggggactctgcagaccatggccagtattcatttgtcaagatgcaaggacctaaactggaatccagtcttttatgatgtctggatcataacaaaagtcaggtatctgctccatgaggccagctaatccccccacaaccccacatccccctgacacacatcatcctcacctagagaaaccttttcacaaataatcaaacctttgtttctttaaggcaaatggacctaaggggaaaaaaaaatgcctgtcagtattgataaggaattgaagaggaccaacaatgtgaagattcttggccaaaaaaataaaatagtaatttgggacaaatttagtaagagaaatatcagaatctatgcaggctcacatctccaatacaaacatattcaccttacactctatatggaaatagtaaagagcaatttgtgaaatagattccatgagtgccccaattagggcaaacatttctcatcaaatgaaggatggaacttcaataaagatttcaaagctggttacatgtagagagatttgtgaagaaaccttgtagctctgatggaactgggatgtgagaagaaggcaggttttctgataaacaattcctgtatctttcacaaatgccaaatcacagactcagcttgggacatatgaggacagcacagactttggaggcaggtagattttgggttgtcacgcagacacccactactatgagacctggatttccttctgacgttattggggataagaagtggcacctcaccatttctaggaaatagtaggtaagtctttctggttgccactgaggtgactcacctgagacacagttgctcctaaagttcaaggttaggagacaatccagaaggggagctgtctgtgaagtcagaattcttggaagaatgtaagtctttacacagtaacagcaaagcagacagtgggaaccactactctgccttcttgcatcattctttcctagaaataccagaaagcagtgagggattaagtctaattcctggcacctgaccttatatctaacagatgctcagtattacctgttgatgggacctcactgggaatgttttgtgtgcagtacaaaagggcaatagatgaaactttgggacgggagcccaggaaaatggctgagaggagagcttatgcctagcttatgcatgagcttgcaaaaagggagaatacacgggagggaagatcagcaacagcatgagttttataaggcagagagttgttgggaaggaagcagcagggagaggggaaggagtaagtagaaacctagaagagatacagctaagataagccaagagaacaaagtattgacttaccagaaacatggaagtcttcctgcttctaatttagttccgcatatctggatatgtgaatgcctaaaatcccattaagcccagtgggttaattattacacttgctagggccccagaggagaggaaacacagtaagtcagaaaaacctctgggcaggtgaatttctcaggttttcttctgggcagatgggatctggaatggtagcgtggcatcctggtaattcagagacagtggggagggtgaagaaacactgatgtgtagcatttctgtggtgtcaacaccctaccatggctgatttcaagctgacaaaggtttagcaactgccttgctgatttcctgaaaatttaacaattagttttcatgagatgcagtgggctgaccccaggacatcactgcctacacgccaatgagaatggagattgacacaaagaacagagtggagagacacagagcagggaagacaagattttcccgagtctcaatccaatatgtagactatgtctcccttttcacaaagaaggaaggggaggagagaccagcattcacattcagttattgttgttttaaatccattacgcacatacataggagaaaatttcagcaacagtcaccctctgaacccagttcctcagttctctccagaggcaactaaaatgctcaattattagtgtatccttttggaaatattttatgtatatgacagtgtgtgtgtgtgtgtgtgtgtgtgtgtgtgtgtgttcctttccaatattaaaataatattaacattggtaatagtggtactaaacaacttagggtgttttttttttcatttaatagtatatttttagtatctttccaggaaaagatacatggatgtgccacattatttttaatggctcacatggtactccttttatgtatgcactataatttatggaaccagttttctcaccgatgagcatgtaagttctttcagtcttttactgttataaacgaatgatgcaatgaatatccttgtacatatatatttgtgcgcatatgtaggtatccttacaagtggaatttctgaataaatggatatatacaatttatttatgaatttaccttcctacaagtgattcaagagagtgtctttgctccacagtgttgtcaatatagtgtattctcaaaatctgacaccaatatgtgtgaagtgcctgctctgttcccacactttacacaggttctcttatttgcgttaagtttatttaagaagaggaaactgggcctcatggagatctaggaacttgcccaaggacaggtctctgtgactctaagagtgcaatcttcccttttccccatgtcaagcacctttccccaccaggctcactgctgacaatccagtgtacgaagaagggaaattacccccacagagcccaaaagtttaggacatgccgacagcatcactcttttgcctcctcattctctctttcatttccagaacatttgctcactcagtgctgcccagtgatacttagccagcctgattacccatctaataatttctgatactaatataaaaccttcccaaagacaaatataactgagacgcactccagcttaccatagctttcctggtggtacagtttccagggacatttcactgtgtcaaagcagggaccacatatgttccagaccagcttgttgggtttttcactgggaagtgaagacaaattgttgtccctttgaaaaagcatctttcatctctccatctatctgcgatctaaagcaatggggctctttctgtatgtctttcaaatggtctacactgacacacgttttctctgagctgccgagagaatatgccatgagatgttgccagtgatggttacactcagctagcagaagattagggactggttaaacctttggagaaattgccttgggaaaagaggaaataaaagcaaatattactatgaaacatagagattaccaggtaggaggaggagagaggtggagggaggggtaggagtggaaggaagggagggaggcagaaagaggaaggcagactggtggaaaataaaccgtgcactttagaacagcaggaagggaggcttggaagcctggttttctggctttgaatgaccgcctagcgcttgccggtgcgccagggtgctgtgaggatgtgggcagagggcgagtccgaagggctccagacactgggaatagtggtggtcgtgtgctcctccctgaaacttttgcactacctcggactgattgacttgtcagacggtaagcgaaccctggagcttccccgttttctgtgaatgtgtttttgtggcttcggttgctgtgacagtcgtttcgaaaatgcacggaaatgagggcggagacccgagagatttgaaaaagccgggctgaaacagcgtggtattggtccccgcctccccagtcgcgccccagtgctgcgctgtccgtcgtgctgaaatgtggtgcgcctggggagtgcgggagccaggaagttagggtctcctgctccggccctatgagcatgtgagtcttgatggattattagctatgggtgaggccagcacaacacatcacaattctctctgaagctgtctggtaactacgtatattgttgatggaagccagtgacttttaaaagccattatgttgattaacttttttaaagaagtttaggagattatatggaggtaaaaacctttgtaaaatgctaatcacagtgtctgacaattagaacacatttaataaatgtcagtttctttgctcaacccttataagaacccttattccaaagccacctcctcagctctgacttcagctccattccttagtgagaatggggttataaatccaggttaacccgattgtttaggattagaaagtgatttggtttccaacgttgaaggagttcaagaaacaaagagttttatttttcctccttatgagatattgttccaaatagaacacagtttgtctagatgatttttgtcacttaaaattaggctccaggaaagattccaaatttcatgagcaattgggctcataaaacaagatcaaactccaatagtgtatatccaaagtatgtataatgtgtattcggtgtatattcttccaccactgcatggtgtagacagaatttctcttccaaggggcaccacatgacaaaaccgtacataataatgaaatgcatttgtagacaaaggactagctaaaataccaactgaaagtgggaagaccagaaactgaagtgtaagatgaggtaagccctggagtaagagtcaagaaatccactttctatccataatctgtctcggtttaatgttggtcaagtcattttttaaaaaattctaggtcttggtttccttatgatgactttagatctctgttccttggaattctagagtgatccaaaggtttctttgaattcagttttgtgggttgagacgggcagccagactgtgagtccctcagctctgcttcaaccagaacagctccactttactgttcagcatgttagccctgtatgtaaggatgttttttagctttagctaaaatttagtgactctatgaccctaaggccctgcttccctgagattttgaaagctgaagcacattcggaaaactttttcttccttaaaaatcacctgaaatctgacaatctggaagactagttctgtctgctccagcccttggtcccttagatgtgcttttctgaagatccaaactcaacctgccagtcaatataccaactgagcagagcccctgttctccaccagatttcaagagaacatgttccattcctgttcagagcttcagagcagcttccgctaagattgcacattaatgcaacagcgtcctattttctttgtttctttttttttttttttttttttttttgatgagacagggtttcaccatgttggccaggctggtctcaaactcctgacctcaggtcatccacctgccttggcctcccaaagtgctgggattacaggcgtgagccaccgcatctggccaagcttcctactttcttataaggctaaagttgcagtagaaatattcccctgctcttcctttccatatcataagtatccatcttccttcccctgctttaacttctcatgattgcagtttttgttttattacaataaaggatatcaatcattcatctaatgttatagcaatgaggggatttaaggtgaaaggtagagaacatatgttgagaactgtttctggaaactctaggtgaagaaaaagaagggaattaacatttattcaacacctacaatgtgccaggtacagtgctaagtgcctttatatacatgagttaatataaacctcaaaataatgctctaaggaaaacattttaaataatgctgaagttaaatatcatgattccttttatataaggaagaagacagatttagagaagttaaataaaatttccaaaaatgcagcaatagcaaggtggaggtatttgtctctaaaatttcaccctctgttctgtacaccaagtacctcagcaagtaatccagttccagatgggatctgcagtctgccattaagtctttaccacacataggctcttatgctagagcccttaccatatggtccaaaatgccatttttaatgtgtatttgatatggagactctgttcacaatttgagtactaaagagagaataccacctcctagtagatacaccaggaccaatgtaatgctgtcattctaaggagagcagtggaacatctccaaagaacccatctgtagtcttccttcggcccttgatcttattcctattttatttttaaggtttttttttttttcttcgagactaaatctcactctatcacccaagctggagtgcagtggcatgatatcagttcattgcaacctctgcctcccggactcaagcgattctcctcactcagcatcccaagtatctgggactacaggcatacaccactatgcccagctagtgtatgtgtgtgtgtgtgtgtgtgtgtgtgtgtgtgtgtgtgtgttagtagagacagggtttcaccatgttgcccagggtggtcttgaactccagagctcaggcgatccacctgccgaggcctcccaaagtgctgggattacaggcatgagccacagcgcctggccaatcttttagggataattttagaacagtatacagatattgagccaagagtcaaaagagctgggttgcaattctggttgtgccatttatcagttgtgtgaggtgggacaagtctctttttctccctagctttctctttcctcatttataaaataaagaaatgagaatgatagttgtattaatttctgaggactgccagaacaaattactacaaactgggtggcttaaaacaacaaacatttattctcacatagttcaggaggctagcagtttgaaatcaagttcttgacaaactcccctagagtctaaagtctctagagaaggattcctccttgcctcttccagcttttggtagctccagtgttctttggcttgtggcagcatcactccaatctcagcctctagtttgtggtaatgtattatgacagtcttaggaaaataatacatcagtatttggaaatgtttcttcatttgccacaatatgatatcaaataaaatacatccacttaaaagttcaggtatggatacacccattgatttggaatgctagtgaatgtaaaggcttaggtcaacttctctctgcagttccaaggaggatgagaaatagcagccttgacctcccaccagcgggagtttccctccttcatccctggtcactggccacacaaggacctggcatctcccagtaaatgtgttcctctgcaacctgagccacaaacctctctctcttttatctctttcctctttctaccttcatatttggttggctatttttagttcttctgcagatatagttacactttaaatgacacacagcctttaattacttacatgttgacttgaagcaatgtctgttgctcaccttcttggaaatatcagaagacaagaacacttttacttcctcctccttctcccatccttctctctgtctacttaatctgtttatcatattctcatttttacaccatcaaggtttataatgctcccagaacatacctccttcaaggtaaatgggaatggtaacctttggcctctccttgcccataaggacaacccagtctcctgctctgcgtgggttcccaatttggccctaagacttttctgtttgtatgatcagcaaaaggacatcaaatactttccatcctccaatgagcagaacacattctgtggtcagaagccttctcattacttctgatctcaaagggacatccagagttgcccaaacccaggccaaccacccttccatttagccacagcctgaagatcccaactatgatcaacaaataagactgactccagatcccactctgccaactgcctacctaatacccagactcttgcagctgagagagtctcttctaaaatccagcccaaaaggcacactagatgtgaggaccagaatatcttgtattttgtagtctattatagcaagcataataaacttatttgtttgagaccgagtctcactctgtcgcccaggctgaagtacagtggcacgatctcagctcactgaaacctctgcctcccgggtttaagcgattctactgcctcagcctcctgagtagctgggattacaggcatgtgccaccgtgcctggctaatttttgtatttttagttgagacatggcttccccatgttgaccaggctagcctcgaactcctgacctcaggtgatccacccacctcggcctcccaaagtgctgggattacaggtgtgagccactgcccagccgataaactttaaaattactttttctattccatatcatagattctgggaggaaacaaggcccaatttgagtaaaagcaactgcatttagctggcttgaacttcttcagagaaagaacaacataaaatattcagctcatctgattttttaatgacatttcctttttatttatattcaattacacaagtaatacatgaacagattctcccttttttaaaccatcccttattctacagatcaggtgaaagtacttgttgctggcctgtacttcccatccccacttttgtccccaggacaaagtactatcaggatactagcattcagagtgagcagattcctagtactgacataaggaggatcaccatctaatttttaaattttaaaaaatgaacacaaagtctattagaggaatgaaatgaacctgctttgtaggtacataatatttctctctccagagagaaaggaggagagcacacataagataggaagatgagagctacaataaatgagagaagagagaaactgtcagaaatagcagggcagaaagagggaaagaggtgagaatgagagagagggggagggaggaacagaggaagatgcgaacaaggagagtcactcagttctgaggcaagcacttgattctccgtggttcatttgggtatccaagtaagttatttcctataatcattggcctttaggagtctgcttagctaattaacagtttgcaaattgccaattgttttttgtcccgcattctccagagactttacactgcaaaggcagaccacagcagcccaccttacacttgagttgtggccaaagcaccatccccaccagacaaagccagccccacagctgaccccggcctgtgagtgtctgaaaactggctgtaaagaacattctgtctagttacttcctcagtaaactctggggctgggcactggaggttttctgaaaggaagtgtttggtgtctcacacagccatgtgcttagtatattccatgcagcactccactgagccagtgcccttgaaatgagcaagcactgcagccatcctcctttatttccctcaaggcaatatccaaggattaaaaagtcagagccgtctgcagattcctcctctctaccttgccctgcactttttgtgcccttcctcttccccctctccagccccaaacctctctcctgatccacggtactcctcctgggatgtccactggggctgatcctcccccattctccccctgagttccctgctgttaatctgtctccagcaaaattaacctagcctatgtcccatgccctctggactctggctgctcgtcaatcactcttaaaaatccggtttctccttaggcaatcattttgttttgattttatgtgtaaaaaaacctgagtaaattttttttttttttgagatggagtcttgctctgttgctcaggctagagtacagtggcatgatttctgctcactgcaacctccgcctcccgggttcaagcgattctcctgcctcagcctcttgagtagctgggactacaggtgcccaccaccatgcctggctaatttttgtatttttggtagagacagggtttcatcatactggccaggctggtctcaaactcctgaccttgtgatccacgcacttcggcctcccaaagtaatcactgctgggattacagaagtgagccaccgtgcctggccaaacctaagtaaatgttttaaaattatactactaacatagcatacaggctttagactgttggttgcttttaagtttgcttactttaaaagctagagagaagatggttgaggtgatcttgtctccttcagtattcactctgagccatgcctcctgaggaagtttgctttaggggaggcattgctatgttatacactctacgatgcaccagcccttgcctcagaaggcaaggtttgaaccccaacactgtcttttgcaaactgttaccttaggaaatagattttatctccttaactcactttttacatttgcaaaatgggtaaattgtgactacctcacatggatgtcatgagatgaaatgtaagaatgtgtgtccctggcatatagtaaccactttcgccaaagactgagttatccaactacagacagagaacagctggtggcctaatcaaagggagatacaaaataacaatgccaagactggaaaaggaagttcatcttaggatttccaagagaaaaagaaatatgactgtattataataggtatatttattaagctcttaccatgtgccaagcaaagttctttatatacatgatatacttcatatacattatttcatttagtcctcatggctaccaggtgagcaccattattttcccattttacagatgaggcacagagaagttaagccacttacctaggaagggcagtcctagttaagaagctgggattcaaatccaagaggctggattccagacctcaggctctattatgagaagtacctaaatagagattggtttaaccaaagcctgagtcccaactaagggcaagactgtgacacagaggtcactaatcagaatgaaagattgagccagagttgagttgttggaatgtattttggtacatttaggttgttttaagtatatcaatctccattccactcaatggttgagttcagtttcaagttttccaaatgctttatgggaaagtcatatttttctcccattgcagcagggatgccagcgcagccatgcttctcaaccaccaagtagaagcaaagccaaactgacccaagaagatgaacagagggaatccagggagttccaacttgggttcacagctgcaattctcaaaggatggactaagccatgtcacccctccagataacacagtcatattaatagtgaccttttggaggcctccctaaacagcaggtgaagtcccaaaatcattagattattcctggcctcaattgtggcccagagggagagccctaagatttttccatgggaacaaagatctaaattctgggactatctgggccatgtccaccctgcaccatttactacaaaatgggctgatcctatggaagcacactacctgtgttgtggtcatatagatcatcacctggcttctccagggctaaccagttagcatggaaatgggacacccaagaacaagaggatagaaagaagggaagggtggaaagaaggaaggaagaaagggtgggagggagggaagagtggtagttttggaaggaaggagggaatcagagctaaagataatacatgatatgagtcagtgttcaatgtccctgaagattaggggaatcaagctttgcttccaggagaattaacacaggagagccaacagagatgtggaaatttaggaagtcagaggagacattctttcattcattcattcgttcattcattcacttgctcatttttacatgaattgactctagaacagatgctggagatacaaagatgcatgagacttgcccccatcctcaacagtcattcacagtctaatcagaaagagagccttgcatttggaatacaatatggagtaataatacctctgtgttcagcctgcacaaaatactctgtatgcatggtcatatgtcccttgaaacaactttatgaggaagatactactatagtctccatttgacagataaggaaactgaggcttagggaggtcaaataacttgcccaagtaaaacaactagtaagtagctgaaccacaaaacagagattcatgcagaaagctgtacaacagaagaaaccaggactacatctgcctcaaaggaaccagagaaggcttccaaagaaggcagcattttaaatgggttttgaaggatgtatagcagctatagaggcagagaagaggaaaaaagtcatttcaaacagaaagaacaggttgtgcattcaaaggtgaattgagaggagagaaaagcatgttcaggaaaagacaagacatttgtggccctgggagctgagatatgccctcgggaaggctggagatgatgtcaaagacgaagattggacaataatgcccatcaggccaggagccccctttctggattcgctgcttccactcttgtgtagaatgatctttttaaaatgttcatcaaatcaggcccccctcttattaaacatttcaaaggttttctgttctacttaaaacctaaaacccttcttttgtatgcaaggcctgaacagcctgcctttatcctgtagacaaaggggagatgggaggaggagctaactcacaaagacagtggttatgtctgctctactcacacacatccctactgccccgcacggtgcccagcacatagtaggtcctcagtagggtgttgaatgaatgaacaaatcactgatgaatgacggccctaagcagggatttttctccaaagcttcctcacaccttggaatgcatttgggggcccaacacaaaggtttccaacttcaacagcaaaaactccacctcccacacaatgtagagttacttcttgctcatttccagtgggtttctgtctttctccacagcctgactccttctcaaaatctctctattcccttccaaatatacattctaaatatttacagaagcttgttattctcctcagagctggcctagagttctcctgatatttcaaagaatttccaagaatagggaaatctcctgatatttcagagaatatcccaagaatagataaagttccatctgacaaatagatgctcagtaaaatctggtgagtgaatggattaatgcaaaaactaattatcatgctgttcatggcaagggatatgataattttttcaagtccaactctggggcaccctcacttccacgtcacatgattaggaaaagggcccaggtggcattcagtagacatagactaagcctcaaccccagccctcaggcacatcagtgccctctctaggctctctctcaccaactttagaattgaattacatcagttgtttccagatggtgatctgcagaattcctttaaagaccacctgtgggatttgagggaggaaaactacactctcccaatctccctctttaacccaagcatctgattgctttcatctgttttacatacttagcttctgtgcacaacttcctttgattaaagagttccttgcctttatagtagtggatgatatctaaggatgatgtaaaatactgggtgttagctaaggttttaccaaacttaaagcctttatgcttcataattccactttattgatgtaggaagacaaatgatagacttactttcaaggtggatagaagggatgcgacctagccaaggctacagcatttctctatggcaccactgccatgacaaccatcagtttgaatgccttatgggtgcatcctatgggttatgcactggccccaagccataacccctaggactctagagccagcagcaaacacaaaacactgaattaataatgagtgagatctctgttcccatagctgccacaggctaaataagttgagggggtattgtaaaacccaagatgagatcactgagcctctggtatcaaaaaggtgtatttcacagaatgtttagttggacgagagcttgaagagcatggaaacgatctggtatcattctggtcaaagaccagaatttagaccccagttctgccatttgctgactaatgactttgggcaaaatacttaactttcctgagagttagtttcctcatctataaagtggggtaatataacccaccttgcaggatactggtaggattagttgaaataaattgtaggagaacatttggctcagtgctaagcctatataaatactccacaagggcacagagagggaatgacttgcctaggatctcctcctggaaatcacacaacaattccactagtatcatgtggcccacaggcagctggtgggcacaaccacactggttcagcattgccatggtccaagaggcttctggtgcccagggaaccagcagggtcccctgagcgttcctcctcagctcccaacacttccctccaggcaccagtatgcagggcaaggtcctggagggggcgccgaaacaccactcgagatcctcactctcaggaattcaatatagaaaacacattaagacctgtttacatggaactgctgtttataattattgttccctatgggatattccccactgcttcctccaatcctcttttaaactgctcaactaatagagttttcctggcttccccagggagacattcacagatgctaatagagacataattcaaaaattgcttgatatacatgccctcaattttccccaagaaccacctaagtaaagagccccagacatgcaacacattcattggccagatgcaatttaacatgcgtgggattaaatatacaggctactacagccaggttgtcatcaagcagcagcaggcatggcattttatcctaaggtaccaccacggccaaatgcaacaggaaagaagcaggctgctgggtgggacccctggaagatcccctcctctgtaatttccactgcaagcttttcccaggccttttcaggcaaagcggggagttttgaaaataaatcccccaggcttggagaagcaaagaatcaatgctaagcagctccggaaataatagcttccatctctctgatatataaagaggataaggaaggcagaaagaaggggcatgatattatgagattgcaacaatacattgcaacattacattaaagaattacagaaagcaagatctagcttcagatgccagttcatgcacttactccctgtgtgaccctgggaatcacttaagctgtctgagacttagcttgtctaatgacaaactggggatactaatatcacctcccaggattgttgggaaggtaaatggagattgacaaatgtgaacacacttagtatgtctttacatagtaggtattcaataaactcttctatatatcttctctttctgaaaatctgaatatggggagcatggatatgcttatatgttggttaaacaaatgcatgaatgttgagcaaatcagaaaatactaaaattagaagactaaaaggagtaaactaggaccgattaaaagaagtttgccttccccaaaactcataaacttaatgaaacttgctatctccagaggaaattaatataaatttaaaatagcataggtttgagatgactttagcggagtttctggagaatagatccatcactggttaataaactaaaaatatagagagaactgcccaaggttacacgagtagaaatttggtgtccccaccactcctttttattgcagagggaattgacattcagggaatggaaatgcccagcccagaattggggatgtggtctgggaacccaggtctcccatcccactccctcgccctctcaccccctcccgctggtcagtgttctttgtcctctgctggcatccctggggacgggccagcccccatccccccgacacacacacattgtcccttcaagatggagccaggctgacaccacgtagaatgacctggaagcccccactcagtctaccagtcctccctcctcacacaggaatagatgggagggaaatgaaataagctgccatctgctgtgcatcctctgtgtgccatgctctgggtacccatctaatcctcgtgaagaccctgagaagtgagtgttcttcacagactaggcaacaccagaaggcaggtgaagaacgtacagaagctacagagtgcacaggtgacaggtatgagagccaagccattcaaactccctgggtataggacccagctcttcccacgtctctgcctttaccgaatcaaacacctgagcacggaagaccctccatcaacatgaactgctttgaattgacatgaacaagcttcaatcaaactataaatgctgaaatttttcaattatagaaagtatttgaaagatcccataaattcccctgtcatatcacgtgagctgcatttactgcagcagacactttttatctcgggcttggaggaaggattagcaagaagaaagtggagggggtctgaggaagggctggcagcctagaggaggacagcagcaagaagcaggctggaggcagttctgtgctgccggccttcatgggtgtggcctttggacagcaccttagcaggaatgtggtggagagcagccccattcactccagaggagagcctcaaactcttcaggcagatctagcctaggtagaatcttggcctggcccctccgggatgacaggtgccattgcccaagaatggggaaaaggctgaagtgctccagccaaagaccccaatttatcttcaggacaattttcactggaaaccttgcctcaccactgcccactttttcagaagtaattagaatgctaatctataagaaagatgactattaaaaataaattaataatagataatacattttggcttacaattttgaataatatagccatcccatcttaaagtaaaaattcatatatttttaataagcctgagacatgttttccaatgaaccacagatggttcatttttattatcctataaagagacattatgggcaagtgttttttaaaatggtaaaacagaaccttagagcagctctcttttgaagatctctaagcactttctaagcatcaggacccccttctgtcatcacagagactgaaatgaggagatggtctctgtcaccccctcactcaccagtgagccccagaccttcatccctgatcagatggaagcagtgtggcatgattacagttcatatttcaactctgccactcaatgactaatagccaagcactaataatgcagaaaatgtaaatttaaaaaataatcttcctgagattggttatgaaatgcactcaacacagcaccatccacagagaggttctttttaattgctcttttctttcctctcgacacccagaatcacaaagcatgcctgaaagcgtcacacatatatgtctgtgaccataacatggcattgcacatgcaaaggaaataaataggtgttacccatgtgacaaaggtccatgagctctgtccgcaaaaagctgttgagtttaaagaacaaataattctgaaaaatcttccaggagatgaaatttgtagaactcaagggcagtaaactagctgctttccaaggacttgtcatagctttattgacttacaatagccaaagataagtcagtattaatcaaacccattctctagaaaaacctcatcatcactggggccagggcagagaagtgtgacacagctctctccagcttccccacttcacagcatggttccaccatccacccaattgctaaagcctggatagtcttccttgtcacctcccgatccccttctctaacacccatcccccggccacccaacatcagcaagtctggtggtttctctctgtcacagagattcaagatcttcccctcatctgtctgtttcaaagttaacatcatctctcatccagacagttgcaacactctcctagcaggtccttctgcatctattttttaattaaatttttaaagataaaaacattcctctaaatagaatctgctccagaacccagattaaaaaagaacgagaagggggaaagaagattagggcatcccagaagctccctatttgccccatttgattcattactccccaaaggtaactgctatcctgacttctagcaacactggttaatttccgttgattttgcactgtatattcatccgtgctgttggacactgtcatacttgattcattcacattgctgtgtaacatttcattgtgtgactattttaacatccattttactgttgaacacttgggtaaacttctgctttgaggctattataaacttgacacttctgcttcccattgctttaaagataagagcccaagtccttgtcagacaggtgaatggtccacacagttagcatcctaggctgggcgcggtagctcacgcctgtaatcccagcactttgggaggccaaggcgggtggatcatgaggtcaggagatcgagaccatcctggccaacatgatgaaaccccgtctctactaaaaatacaaaaattagccaggtgtggtggcatgcgcctgtaatcccagctacttggaaggctgaggcaggagaattgttcgaaccagggattcgaaggttgcagtgagccgagattgcaccactacactccagcctgggacagagcaagactctgtctcaaaaaaaaaaaaaaaagccaggctttttctcatctcataatctttgcgcatgctgttccctcttcctgaaactgctttcctaccacttctcacctttatgcttcacctcgtagtgttcatagactctccttccttcctaacttaaaagaggctccttctggtttttccttcatacacttccctcactcttttccttcactgcactaaagatgatttctaattgcatagtcattgatgccagtatttgtttattgtgtcattcctgctgaacagaggatgggcctgacttatttgggaccatgttgctgatgcctggacctaagcctggcacagagtaggagctcaacaaatttgttaaatgagtggctgaatggccatactctcaaaggacccacagtctaggagagacagaagaatctttgtctttttgtcttgcagtgggatggaagctgcagggaggggtcttgtcacattgatactgtctggggaagacagaaaaacttcagtttcagaggaggtagcccttgaaacgagatttgagagagggcagcacattgtacaactccatgggcaccatgcacattgtagtccagataaacagagccccttggagatatgtgaggcatgggatagactcagagaaacccaggaaataaccccttcaggcatctgacatgcaaagatgtggaagtgtcaaccaggaagtcatgttgggggaacagcaagtatttacagaaagtgactgtgtgtgtctgtgtaggagggtgactttgtataggagagataaaacctgtgagctaatcaaggagaagatcataaaagaccttcataaagagcatggcctttttcctgcaagcagtgaggagccattgaaggctttagcataaggacagtcagatgtacttccctagaatgcacatttccttctgctccagaacttctgcacaggaggctcctaaaagctctccccatcctccctgtacacgtagaatctgcctctgtctctctttctctctcctcctcctcctccatctcctcctcctcctcctctccctctctctcgctgtctcacacacacatacacacacactccttccttcctatctagtcagattccactccttgggatttcaggcccaccgtcactcctcagggaagcctgccctgaatgcctgcactacaccagggcccctttcccctgcccccatcccagagcaccaaatagctttcccttgcagcacttctcacagctgtcattttatgtttgtgtctgtgattcttaggttaagtccctcatgcaccaaatcataagatctgggaacaaggaccacacctgtcctgttcatcactgtaatcatcacactgcctgccaaagtgccttgcacatattagatacttagtagttatgtgttccatgaatgactctttaagagatcttctagctgttcttgcaaagaacccattggtaaggttgaacctacaggctgatactttgcactagtctcaggaagagatggtgagtacatgaaattgagtcccccagaggttaatgcccagtgccccagctaggaaacgtccaaggaggcaatttgaaccccatctgtctggctgcagagcctagccctctaatgcattcaggggtcctagctcctcgaggatgccactgtgccgtgaacttctttctgaccctcatggctcccagcacagcatccacactcagaagtgcaagatgaatgtttgcagataatgaacataaagctctcaggaaccctcatctcctgagaatctgctttggcccccacagcaggtctgggtgtggaccttccccaatggccttgggaaattatcaacatctccccattagctgttgcaatattaaattgtgtgactggaaatgaatgaataatcccatgggcaagtgagggagaccaagcagcagggatttaataacaagtcctgccctttctccaagcagaaggtcttcctaattaaatattaaaaatctatccatacaagcaagagcgaaaaattgcattttcagcagtgcagctttgagatgctgcctcagaagacccaagagctgtgggaatgccctctccaggacctagaagagggggccagaaaaccgccatgtggtaagcactgccgggtacccgggtatcacaggccttgccacattcaatcctcatggggacaatgagacaggggttagatcacagccactgtctaaatgagcaaactgaggcttagagagggttagtgacttacccaaggccaccaggtatcaagtggcaaagttgggatcttaacccagttctatgtggctataaagttcatggaatagaatgctgcagttaagaacatgggctttggcatcaagcagacctgtatttgagccccacctctgctgtttattaactgtggccctgggcagatgaccttacatccttaagtctctagttctttgtctttaaaagggtggcagaatgtacctcactggttttaggaaggtcacatgagatagtgcacatgaagccctaggcatgggaaaattcttctaaaatgtcagctgccattctgatcactgcaagacccccacccccaatactcccaattgtaccaccccaccccactcaccagtgtctcagaaatgcctcctccagaaggaaggcatcctgtctaacccactgcttctagccaagctgtctttcttcagaaggtagaaaaagattgttagtcattgtttaatctttattgagtatataccgccacaccaattgcactgccattcattatctcatttaaatctgacaagagccttgtaaagtagggattattcccaccatttcccagatgttgaaactgaaattgataaacacgacatgttgccatggctacatgaagatctccaagccggaggatctccaccctcacctgcctagcttcccagacctctctgcagaaaagggactgacccccaagacagccctggcctctgggctccaccccttccacatccatcccagggccgctgaggactgaagagttctccacgtttgccctttaaagtgacttaaaaataatctttatgaatttcttcatatacaaaatttgtacttactcattgcagcaaatttagaaaatacacataagcaaaaaagaacgtaacagccatccataaccctaactctcagagatcaccactattaaaatgtttattatctaagagagagatgatatagacaaagatgagacagattgacacagagaagatgggtacatgatagatattttctgttttataacccttgctttttcttgcacttctaggaatttttctgagaactaatctgaaatctgcacagggtccccacgtctcggatcctcatcccattgcctcccaccttcttgaactttgcttcaataattatcacacctcctttgcatgtttaatcttcccccttttaatgacaactaccaagacctgtttcctagtgcagggtcatgaggtaactaaaataagaattaaattgctctgtgaaaaaaaaaaaaaaaaaaaaaagttttacagtcccaggagattttctccagccttatcatattgttgataccatagggtcagttctgaagctgagcccaactcagccctaagctttctaaaggggaattgccaggtcccctggtattccagctgaaacctcaaacatcctaaattgtaggctctattaactaataaggagaaacacacttccttccccttcccatgacttgtagggagtctagggtctcaggcctatgtcacaggccctcgattgccatgagtcagcaaggagaggaaggacacgaagccagcaggcagagagctggccccacagagccatcctccgtgaagccccagcaaacgggagggaccaagtttgtttcagttttcctaaaaataacaagactgtattttctttgctgttggctgtccctaaaactgttaacatgggttcccagcctggcacaatgtggtccatgcctgcctcccacatacctgcctcccacccctctgggccttgttcccttcatcccagcctccagacacacctgcctcctgtcatctctagagcaggcttatcttgttctcctgtgggctccttgtagaggatgttccctctgcccagaacgctctccctcactcatcacctgttggtccccttctcctccttccaggctctgtgtcaaggccaccacagagaagccttgcggttatgtttagttcttcctgcctaagttcgcatggtaacccatacctttcctccatcataatttgctcaactgtaatcaaacattatttttaaaaaatcattccagcctgggaaacagtgagaaacccatctctacaaaataaaaaataaaaattagcttggcattgtggcatctgcccgtggtccctgctactcaggaggctgagatgaaaggatcacttgagcctgggaggttggggctgtggtaagccgtgattgccccattgcactccattctaggcaacagagtgagaccctgtctcaaaaaaaatattattcatttaatatctgttgccaccacaggactgatccctctgtgagggcagagattgttcatgcatggaattgtgatttataagcactggctctggagccaggttgcctgagcacggagccagctgtgccctgcgggacacctgtggcacacttcactcctgggacacctgggacacgcacacaatagaaatgttcacattttactaggcaatgccagtcacatagtcctacctaatttcaaaagggtaaaaggtacacccaacacgcatcaggaaggaggaggaccagaaattgttggtgacaagcacaaatgaccaccccaatataatattttgtttggaaggcattttattccacaaaaacaacattacaataaacacaacaacaaaacactggttgcagtagaaccaactttccagacctatctgcacagcacaaccattatcccactcaaaatgtcatgtttttacccaaaacattaaaattttaaaagcaattcaaacccatagcttaaaaaatgttccaaccagtaataaaaggaaaagtgtgcctcctcctcccaacttccctaccccacaatcgcaagatattatccttataggcgaaaagggtttcaggatttgagatgcaggctgggaggtctgagaagacttcctatagaagacatgacttcaaactctttcttgtatgtgagatttaattttcaaagactcctctgatccaacttaagctttatggtaaatcaccttgggacttaaatgatgagaagcactgctatctcacagtgagaaattcagaagggctgggagttccaagtcagagctctgatctggaaagttccatcaaagcgtcactccaggcttagcggttgccacccaccactcgtcagactaaacagcctcagagccctgtgacctgctaatgtattcacaaactaactcagctaattaatcccagctcattcatcctctcaaactatgcaagtcttccagctggccctccggcttgctgccctggctaatggagtgttacgtggactctctgtaggttgcaccttactcgcagccaagcaaaggcactcattaagaagctgagccccagggctcccccatgagtggggaggaaactcatgagtgccttctatatgccagcgctctatctgcaggggttcttttgatagcagcagactgagagatgatgttactgtcccctttttcctgttgttggcaactgagactcagaggatggaagtgacttgctcaggtccaccacctcttcagctgtggagctgcgacaggagcctttgtttgacttcaaagctcaccatcactcctctctcactgatgctcaagtgggctatcacctcgcctttcctgagccttccttcgctatcctaaaacagcgcctcccgaaatcaccactaaagaacttattcatgtaaccaaacaccagcggttcccctaaaaacctatggaaataaaaattaaaaataaaaacagtgcctcccatgacccatgtctctccagtcccataactctgctctatttccattcacagctccatccccacctttatgtcttttgttcactgctttatccccagtgcctagaagagtgcttggcacctagtagacactcagtaagtatttgtcgaatgagttaataaggttgtgaaaagaacgttagattactggaaggattcatctgagtttaattctgctatgctgggaatccagtgtgcggccttggatgaagccagttccctccctgggccccagtagccacatctgtacatttagagggcaggagaaaagccacacgctctgtgacttatacaacttgttgcccagagtggaggctgctttgatgctcagaaaaaagaaacaaacatggaaatgctaaatgggtggcagagagcttgagggaggaaggagatggggagggtactcttgaaactgtttggtgtcttccctcctgccccctcagtaccaattgtcaagtacagaaagtgaaggagacttgtattagtggaatttggtccctgacttgttatagagacacaattacaaagacacaagagtgggcccagcagagacccttagggtggtcccttgaggttccaaagcatctgcccatcaagcagatgatgtgattagtctctgtgaccccaaggatgcctcctgaaattgctgattcaatttctcctaataaaataggaacaataattagctaataagaaatcaacaattaaagctatgagagaattaagtgagatcatgtaagcaaagtacatgtcacagtgctctgcaaataggcagtgctcagaagtgtcaccttttctctttcttctctgagcctccgtcttctcttcggtaaaatgagaataatattatgcatacctcacaggggttaagcaatgtgaaagtactctgtaaagtataaggctgaaatgtactgggctcagaacctataggtctgttccattctcgacacacgtgatattagcagcacggtacatttaaggacacggcttgattctttaatcacagggcatcctgtcttctccacattgcttgggaccccaaaaaatgaagttctgtcatgtctctagaccaccaccaaacacataaaagtcacttaggaaaacatggtaggaggcagaggaaaggaattgttgaacagggattgcagattcaggtatataaacgagtgatgatgactctaacaacagctcttggtcttagtgttggaaatgtaatagggagtagtggggactgcggtttaattgttgccgtgtgggaatgtgggcctggcatggccataatttcagatttctaaaggaaagccaaaagttcatatttttatgtgaaataaatgttgataaagttcacacttaaatgaagtgaaacagaccagggctggtggtttatacctgtaattccagtgctttaagaggccgaggcaggaggatcacttgaggccaggagttcaaggctagtctgggcaacacagtgagaccccatctctaccaaaaaaaaattaatttaaaaaataaaagaagtgaaacaacagtaccctgtgggctgccagattgtgatttctgaactaaactgtcagattacaaagttacccgctaaattagccaaatactttccagatattccctgggccactgtctcgggactcttaatatattttccaattagttccttttagtgctacatacacacttttagcaaataatgagcacttactagtcactttctatgtgcaaagcagatattagacatcacagagggagtgagataccgaaaacaaaaataaaacaaaaataagcacaagacacaatctccgcctaccccacccttgaatatgaaaactgtgacacccaaaggtagattttgatacctgctgggtgattgctagagataataagtgctttgggaatttggacagagagagcttttttttgcagtggtctgagagagctgcccagaggagatggcacttacgccatgttttaagggtggataggattagtgccagatgatcacatgctctggtagacaggggtctgtgcaccagtagattctggggctattgcagaggactcatgacagggattagtctctgtgaccccaaggatgcctcctgaaattgctgattcaatttctcctaataaaataggaacaataattagctaataagaaatcaacaattaaagctatgagagaattaagtgagatcatgtaagcaaagtacatgtcacagtgctctgcaaataggcagtgctcagaagtgtcaccttttctctttcttctctgagcctccgtcttctcttcggtaaaatgagaataatattatgcatacctcacaggggttaagcaatgtgaaagtactctgtaaagtataaggctgaaatgtactgggctcagaattggggaatcgtctggaaaggtagaccagggccctagcgtggactcttcagcgccagcaggaaaatctaggctctgtcttgaaggttcctcagcaggaaggtggggggttgttgtggggtgaatctgatggaaagggattcctcctcctcctcctgctttctccagggtgaggaatctaggcactagccctggggcccctccaggtcccactcttcacctcttgttttttatttctcctgccatacaaccttctttttatttaaaatagatttaagcaggatagagccccctcccccaccatcaaggctgtttccttgtaggtggggggatgccttcatggtaatgatgtagaccctgagacaatatagagaggcagcagggcttggaaacaggcagtatttcctctttttatgatggtttcattttacatttttattggcctttcactgattgctcccgggctctctggcaggatgtgagatgcgctgacatttatagaaatcaatacattaataaatcacgaagttcataatgtctgatttgcttctaaatgagacagaactattatcgccataaagttgcacataaaatatgcccaattgtgatgtattgtgtagtctaatcaaaggcatttgagtgaataacctttccccaaaagaaggaaacaatcaaagctgaataacttcattaataattcaaggtgtgtctgccaaggcttcatttattaagtgcacagttaagaggcttcagagctgaatcctggagaggatagcaccttgccatcttctccctgcctctgggcaggcggatatacattctcagatgaactgactgcactccttgcatctggaagttcatgttccagtggagggtaatgcccagttgacttcttcagctaagagatggcccgtaacagtgctcatggactgtccggattcttaagggcagaggagccagagccaggaaatgtccttagtggccatcagttgttatgtctgttcactaatgttccaggccctatgcttctggtgtccaccacccacagaccccctgttctgttccacggactgagatgatcaacagtctttcatccagagggttgtgtttgctggtggccattacctttaacataaaacgatcatatttactttatcctattcatgtccaacctcaactgacaattgagttgtgtctctgacaataaatagcagaaaaaggaaatcttcctatactgaagagaaacacaattaattaactagatccatcaggaaaggtacaatcatgattgagacagtgtttaacagatgtgactattggattctgttgttgagaatgacccttaaaatcacagtcaaaatatacgacaagatggaaataacatttttgagcacctactatgcatgtagagcatcttacataccttatctcacttagatttacagctgcaaggtgggtatgattctagcttgaattagtctaataaccatatacctcctaggggcagtgagatgattagatcaattctaaaactattaccatgctctctgagctcaccaagacaggcagttaatacaaggatacattaataccgaatccagcaaaagctcacatggccagcttccattatgttcctatttgtgattattctgtatcaagcacagaaatgtatgttcacacgaacaacaaagaaggggtttattagtgtggattacagggcctaagcctaccctctgaaactggttttggagtctttagcacgcttgtttgggacagttaaacatgtgccagctattctaaaacagtagcagtaatgtgatagagctgggtcataccgtgcttcccaaagtatgatcacttcatttcaacaacttcacactaacagcctgaactgggctgtgaagggaatatttagaccaaggaaactggaaaactgtatcaatcaggcttttccaccctccccaagagccagttgtcagatatctaccagcctaccaacgctagctctctaatcagaaaccatcacttagcaagttcccaaattatctgcagagcaatgaactcctcttcttcagaaagcaggctgaaagatacactgttcacatcttagcctgacctggacccagtgagtttccatcagtgagaaaattctgtgctaacttgagataatactattcttgtggcaattttacttttcctttgagcgattccttcaacctctctctgccccttcatttttccgtcttaaaactaaaagtgccctttctccctggacactcctcatttgcaatgaattgtcatttcagctcctcagtcaagaggagtaatgaaatcccacccgtgttaatcctcttatatcccgcagaaatattgtagacccactcaccctaggcaacatgccctctctcttcaacacaggtcatcaattgttcatttactggctatctccatgtactggaacttcagggtggtgtccagctgggttcaaaggagaaacagtgggaagtttctccactgccacctgaattagatgagaaagagttgtctactgaaatacactagctggtggcaggattgggacgtcatttgactaattgcctcctagagctgcagagactgctggaactacctaagtaaatcatcaaaaaaaaaaaaaaaaaaaatcatcccagggcactttttccagacaaaaaggtccacttaaaacatcctctagagatctgtgcctgaagctgagctgctgcaatgaaactgacatttctgccttgcagcctggccatgggcttagctggactaaaatgctgctgcagtggtgagggcacgtgagagtccctaatgtacatggccttgctccttgtcctgacacatcttttagggctgctgctttctctagtgctggaatctagataattcctttcccagccgtttgtttcttcaatcttggaaaatatctggatgaatgtaacactgtcacacacaaacagaattatgacttacgtcacattctatgtcgtgattttgtggacttttaataattgcattacatttgtgaccattaatttccaccatcgccctgctcctgagaatctgtaagggacatttgacactcctctccccacccacctcaacatttgtgctgacctgaaggtcacattaaaaacatacccatttggagagaaagatctgtctactgaaatacactaaatattgaagaatttccaagtcatttgatcttgaaaactccatctaatggaagcagaaacactcaaaggtttttttttttggactccctttttcaggacactttcaggactgaggtatataaatgaatgagaaatgtataaattcaatttcacttaaaaggagcaggaggggtttcaagattaagagaacaaatgcttgaagcaaaacatgatttgagttttattgaaccgagaagactgaaaaaaatacgtggaacactcagaaaatctttatcaaggctcagctgagcactcctggggctcattgttaagtttataaaactcagagctgatgagttgtgtgcactgtgtgggtctgagtgggcttatgactcccctccaagcctggctgtaagaatctaagacttaaagctgaaggaccaaatgggactttccgtcccatcccctctctgctccatgcaagcaccaacgtggatttttgcccctaattatattagggaacgctgtcaatcaaaaagatgatgttaaactcatccagaacaaaccaaaccatgtttaaggggaagaaaagattacatcttcaaatgccagcatgccatcattaatacaatgtctaatgtagtcaatatagttcaggcaacattgaaaatgaaccactgcaaatactaggaatacaatttcaagaggaagcacaacattctgtgtttctatgcacacagtcctgtaaattatttgcagctcaagtatgtcatgttcttttaaattttcccctgggtacagcttgaacaacttcctacaagtgttgatatgtcatattctcattatcatttagttcaaaattaccatgatttaattaccatgaggttgcttttttgatacatgagttacttagaaattgaattaggctaggcatggtggctcccacctataatcctagcactttggaaggccaaggcaggaggattgcttgagtttgaggccagtctaggcaatatagtgagacctcatctccacaaaaaagtacaaaaaaactagccaggcatggtgacacatgcctatagttccagctactcaagaggctgaggtgggaggattgcttgagcctgggaggcagaggttgcagtgagtggagatcacaccagtgcacttcatcctggatgacatagcgagaccctgtctcaaaaaaagaaaaaaagaaattgaactatattgcttgatttccaaatgtttttgaggattttctaattttcttttggctattgatatgttgcttaattcaactctggacaaaaacagtctataacttcaattctttaaagttttttgagattgactttatggcccaggaaatggtcacttttggtaaatattctatgtgcacttgaaaaaatttatagtattttatgattgctgagtacagagctccatacgtctcaatgagacaagtttcttaattatgttgctcagatcttctatacccctattgatttttttgtctgtttatcagctgctgaaagaggtatttttaaattactccaattatgactgtgaatttattatttttccttttaattctatcagtctttgctttatttgtattttgaagctacattattagtacatattaatttagaattgttttatcttcctagcagatgggcccttttacataagaattctctatctctagcaaagttacttgccttaacatctactttagctgatgtaaacatagctgtgccagtgtttcttgatttgtgtttgcatggtatatccttttccatcattttacttttattttctgtgcccttatgcttacaagcagcatttaatcagggtttggtttatatctgatgatttctatcttgtattgtagattttctattttttaatttttcagtggttttactctgatgttcttataagtggttttctttgtgtttatcttgcttggggtttgtagtgctccttcactctgtgacttgatatatttcactcatttttttaaaatgttcatttattagctctttaaatatcgcttcattatcattatttatctctttcttttctgagactccaattatacatatgttcaaacttttcatcgcgtctcatatgtctcttatgcaagcttatctgtgattccattctttttttttctttttttgagatggaatctcactttgttgcccagcctggagtgcagtagcacaatctcggctcactgcagcctccaccccttgggctcaagtgattctcctgcctcagcctcccaagcagctgggactacaggcgcgcaccaccatgcccagctaattttcatatttttagtagagacgggatttccccatgttggccaggttggtctcgaactcctgacctcaagtgatcccccgcctaggcctcccaaagtgctgggattacaggcatgagccactgtgcctggactgtgatttcattcttttctctcttgtgcatctgtctgtgcatttttctattgacttatctaccaagtcacttattatctcttaatctgtgtcaaacccacttttaaattggtctgtttaattgttaatttggataacatatttttcaattctacaatttttgattgactttttgtatatattctggttctctggtggaattatctagctttttgtatattttcttgaacaaatgttcaccattattttaaagcccagatatgattaatccaattatctagatcagctgtggatctattactgtattctattttttctcttagtcttgtctcttaatatgcctgacagatttttactgaagggtgcacattggaataaaaaatgtgttacctatctggttgagtcttcagcttcagaaaggtaatagagcaaaggcagataaatccaaacagggactgagctgttttcatgcaggctgccttggtagctctccaaagccttcaaaaatgatgagatttttttttaaatcctttttatccagttgttctcaagggattccacccctgcataggagagctcaccattcctgggatcttcagcttctatgcctttgcatatgctcttcccttgttccctcattcttcaacactcaactgaattatcacctcccttgaagccttctctgacatcccttctagtcccatgccacccaggaggcactaagagcttcctcccctcagctcccagttcttaaacatgtcaacactgttttgaaatgatttgccaatgaaaaattctagaccagcaaccaacaacatccttcccaaaggtgtgttatatatggtacatgctgtatgtgctaaacaccaaattcattgataacagctaagaaccaggaaacaaaccatcgttaattatggcatctcttgaaaaatctaaagatctggactcactgggcttaaatgactgcatgataacaactggttgagtaacaactgtttccctttcatggagcagttactctccagttctcagttcctaccactctctatagttgtacactcatcatctgtcctcatctgaattacctgccaatgactactggcatttgagtttctaatccatggtctatgtgtatgcctcctcaccagtgtgagaactcatgtaaacaggtattatgtcttttcatctctctcctaatacctaagacattcctggcacaccagagcatgtcaatgcttctaaacatatctatattaaaatgctaccaaagcattcagggtagtgaaactattctgcgtaatgctgtaacagtggatacatgacgtcatgcatttgtcaaaacccacagaactgtacaacacaaagcatgaactctaatgtaaactatgggctttagttaatatctacatatcaataccggttcatcaactggaacagatataccacaccagtgcaagatgtgaataataggagaaactgtgagggcggaatatacacaaactctctatattttctgtgcaatttttctgtaacctgaaacagctctaaaaataaagtatatttataaaaaataaataaatacaaatgccacctcaccagaaggatcaaaggggcaactaaatccagcaaagtaagtgtctcacgtggaatacaggtcaggaaatgagtgaaaacactccaatggatgcccacctatacgatcactttgaagagcagcaggaaaataagcctctgctgtctgggttgcagattgggggacaggagagaaactaatacacactcaagatggtggctgagctgccttacacactcgtggccaggggtgcttgcaagacaggcggaagttcaaataagagcctacagaggaaatccaggccaaccacaaaatagacccacaaaggccagcaggagagtatctagtggagctccctgggaccttggactcacccagctccactgtgccatggataattttccaggtctggtattttgtcttgtattttatattctgcataatgggggacttggccggcatccactctgccacacatcctaatgggctaaccctcttctgcaactacccttttctttttctgcatctggttactaatcaagcttaatgggggaagaaagaatcaaaaacttgtagactgtaagctccaagagaacagagaacagagctgttttattcactgacttgtacctagtagatacttcattgacagttattgggtggagtgagcaaacaaataatcctacaagatatgcagtttccaatcacaaagaagcagagagggggaatgggggcctcctgattgtggagggtatcttataagcctctcctcagtcaaacatgcgagtgtttccaaggacccatccaacattgcacatctctgccatgtgccatcccatctctgcaggctgcatgactgcatggctgagggcatgttcaatgagcccctgtgggagccatgggcactgggaggcaacccactgctcttgcctgttctgaccatgggaaaaggacagggagctcagctccagctctgctactgagaggctcttcgcatatgtcaagctggacgacgtggacaccctcagagcggcctctctccattgacaataaaagtgtgttttgcttttcgatgaatcgatttggtaaaatgttttctcactctttcctagacatcgcctggtggtattaccagtatcagagaggtaaaaaacagtttaaactaacctgactttggtcacatgacttgcaaaggcagagcttcttaatcaagctcatgttttgtaattagtcttctcatgcaccagctttctgtgtcctttgttaacaagccccacatatatagaaacagttggaaatgttcttttagagacaagttacaggaaaagctttgctccccgtaagaaatggttacgttttccttttacagacatttgtaaaaactcagagcccatttgcagctcaagtgtagtaattgcttcaaacaaatggcctggatttctgtgttctctttttctccatggtcttcacctcctaatctaatcaacatatactgaggcagtttttcttattactttatctctttttatttcatatttatttcctataatcagcttcaagtcctttgtgcaacaaagtggcatgtgtttaaataaacagtgaggagtaggctatgtggtttgtaggtgggagggtaagtaggtatagatcaaaaaccaaaaactcaatgcctattgcacagggcaagcagcataaatgaattctgtgagccaggggtgaacaacaggacatcctagaggctgtggctgcccagaggggacagccggtgttcagctctagcaggctgctgaagtgtctgaatttgagaccaaaattgtcagataatcccattttccaagacaaatcagacatccagatttgtacatggatctctcatctttaaacatggacaactaattccaaaataattaagatacattttacaggtcaaacaagacctatctttgggccacactcaagccgaggatcactattttgtaacctcaaagctagacggatggccgggtgcagtggctcatgtctgtaatctcagcactttggaaggccaaggtgggcagatcacctgaggtcagaaacttgagaccagcctggctaacgtggtgaaaacccgtttctactaaaaataaaaaaaaattagccgggcatggtggggcacacctgtaatcccagctactcaggaggctgaggcaggagaattgcttgaacccgggaggtggaggttgcagtgagccgagatcacaccattgcactccagcttgggcaacaagagcaaaaatccatcttaaaaaaaaaaaaaagctagatgggtaagtataaagtccaaatcagagacaccatgagggaggcactattggccagtccagggaggagatggtcatggtcacggtcctgagcctgacagaggggtcacctcactggcgagaagacccaaggtgtgagtcctcccactgctcacagtccaggtctaactggtacacaagcacacagcttcgtaggagcatgtgtgctgcaaggctggctacaagcgagtttgcaatttgtgcttgaggaaagcagaatccactgtggggacatgtggaaaccagatatgatgaaaggggcctggactggctggattctaggtccagatatgtcacccattgctcaacgacttaggactcagacaaagccagttagtgagaaggtttagaagagatctcctatgctagaatagcttagcattggctggatgtgtttaacagatacagaaacccactgaaagtacagtcatgctctgcataatgacgtttccatcagcaacacaacatacacaattgtggtcccataagattataacagagctaaaaaattcctattgcccagtgacttcttgaggttcctgaccctgtgtgggctcaggctaacgtgtgtggttgtgtcttcatttgtaattttaaaaaaagggttttaaaagaaaagaaatgaaaataaaaaatttttaaatagagaaaaagcttataaaataagaaaataaagaaaaatatttttgtacagctaggcagtgtgaattttaagctaagcgttatcacaaaagagtccaaaagtttgaaaaaaaaccaaatagtttgtaaaataaagttagagtaagctaaggttaatttcttattgaaaaaaaaatttattaatttagtatagccctaagcataaagtatgtataaagcctacctcatgtttagtaatatcccaggccttcacactcactcaccatcactcactgactcacccagagcaacttccagtcctgtaacttccattcatggtaagtgccctaatagttgtaccattttttattttttacaccttagttttattgtaccttctctaaatttagtatgtttggacacacaaatacttaaaatacttaccattgtgttacaattgcctacagtattcagtacaataacacactgtacaggtttatagcctaggagcaaaaggccataccatacagcctaggtgtgtagcagggctaccccatctaggtttgcgtgagtatactccacgatgttcacacgatgacaaaactgcctaacaacacatttctcagagcgtatccctgttgttaagcgacacatgactgaataagcaaatgtgcagtgattgtgcattttttttcctgagagagtctaaacccctcattccacactcagaagagtctatgatcccaaaacattaaggatcacttaatcaaaatcatctactattcaatctgagaatttcctgtgtagcatcctctagagttggtgattccatctctctttgcccctagtgataggtattcatcactgtgtgaggcactcacagttagaaaatcacttcttaatatcacatgcgcagggcaatggtcccctcactcccttcacacgtaaggttatggaacaacaggcatgagaacgctgaatggcttaaaagtactttacaaacaaaaggtgctctaatttattcttgttatgtcattattgccatagtattacatctcaagttaatttttatctcaaccattcaaacttaagtctgacttagtaactagctcatcattattttttataacaaagtaatgactagcaacatctggcatcagactttgaacaaacctcagaaggaactgtcaaggaggctccccacgggttcacgctcttctctcctcctgcacacagggaacagggccattctccttcctttactgggactacctgggcttcatccagggaatccccaggtggcaacaggagggtggtgaaaaccgctgcccgtcacctgtaaagtttcctgtgaatgtgtctacagcggccagcaccacaaggcatacaaagaaagggaagggagagctgatgtgagagcggcagcgtgggcactcctgtgaggttgccacagctgtagacaagttaaatcagtgcagttcaatcaaaagtcatgacccatgagcgtcacaaccagcacgagtctacaaaggaatacattaaaactaagaccagagcacagctcacattagtgagggatgggatcatttcatggagtttttgtttcaaaatatttcattaacatttcacttatatacatgtgtgtatactgggttgtgatttaaattacaattcttactataaaatacagcaaaagaaagaagaaacaaagagagggccactggtttacctaacatccacaggcaggctacttcccagcatcttgagccccaaagaagtaaatttccttccacaaccgatgttaccacagcctgacacttagccaatgatgaaaacgaaaaacaaaacaaaagcttggcagtcagtatccaaatatgcagatactacagaatctgtttgatgtagaagttgatcctgctacccagacagcaaacaactcatttattaataaagtccagttcctccttaatgaagtgggtttaatagttgatatctcaataattacttagtgcattttttatgaaggtgatgggaaacaagtgctgtttcttgagtcggaaagagtctctcaagctcccacaaagaaatttcccgagcttgtgaggaattcagtcacaggaagatcaaggaattaagtgtactgcaaaaaacccttcatgcttctggctaagataaatctaacagtgtactggatgtcttcaagaatacctcatttactcaaaaaatacaatattcccattttctttatttgcattttaatgtgatttttgcttcatctcctttcttcactcaagccacctgggccgtacccagggaattcctaaggggcaaaaggagggatgtgaaaacctctgcagccccttcggaagtttcttgtgaatatatgcacagataaacagatgtgcattttaaaaataaaaatgcttttagatctaatgctaggagattcaaaccaacaattaatttctctgttaaaatgggttaaaatagatgtaaaatattaatatgtatataagcattctgaattagacttatgtgaatttttctccttttctttctttctttttgagaataagccctttcatttacgtagaaatgcttcagcgtttagataattgctacttatcttgttagctacaaacacaaccataattaaaggctctgtaagaattatgaattctggggaaattggccacttgtctctgtggcgtaaacagtatctaatttataacaaatcatctgccttagtcccagcaggataaggtgatatgtattgcccagcacatgagaaagatggcaattaggaattgttaccaagttacgggagcctcacacgaacatccatcacctttggggatatgtacaagatacaaacttaatttgatggattccttttgtattgggatcaaagtctcaaaagggaaagtgacaatttcagggaaaatctggtgcaatgagaccaacactgatgagagaaatgcacacaatttaatacacctgctcacctgatgtggcaactcagcctgtgcttgctgtgggttgccacaggatgagacatggtctgtgcatattcccagcagccacccatctcatcactattcttgccagcccagatttacagttgttcaatagatggatttggtaatatctgcatgacaacaacaggcagagaaggttagatggcaattgattcttgattggtgtaagtttatagaacacattctggcagggcccaaaggaaatcactcacctacccctctgtgatggtaaaacgttgaaaattccacggacttggaccttgtgatccttcagtggaagatgggcagattccttgctttaattgacagacactttctaaataactaatgcaatcttatattacattatagtccataagggagacatacttaaactactacttacaacaactgtttttagagcctttcaaatggtttgtacaaagtagctcccatttaagatattttcctagtatttaaggctatctagtagacattacaaaacaatacgctgtaaatacattcagatttttatcagtaatacttaacatgccgtaatttgaactttctgctaaatcatgctatccattcctagttggccccaatggtgagagtttactgtttctttaaataattttgtttccctttgctgtctagaggtgtttatcattctgcttacttgcctgtgtctctggaatattcagaaggttccatgggaaacaatttgaatatgcaaagaagttatttttaaagcaaggaaaatgttttcatatggatttattttgagcacttctgcctttgcctccactgggaacatgtttctctccaacgccgaagccccctccctgtgtggtgtttgacgcagaggctgacagggcagggaagtggggttcaagataggaaggccattggcagtgtgaccccagcccacagtcctagatcccaggtcgtgacaccactcttttgacagcccagattgttacctaacaagaatgactcccaagctcaaccattccaatgccatctcctctggttccagataagattgaagatgagctggagatgaccatggtttgccatcggcccgagggactggagcagctcgaggcccagaccaacttcaccaagagggagctgcaggtcctttatcgaggcttcaaaaatgtaagacccgtgcacgctctgaaggcctggggggggttcccacgtgaggctacactctccccaatgccaagggagctcataaggcgtttcccatatgtgaggctgtacaaggaaggccagctctataaagggggcatgagagggagatcacctggctagaaaggaaggctccaggcgaggatggagcaacctcaggagacagtaaacggccaactgcccagaaatttcacagggtggcacatcctcaaggaattcaccctggcccagggtcaagccttagcccttaacataatcataccttccaacctggtggtgcccccacaataatgggatttggccctgctgacttatgctaaccaggctcaccgagactgatgtgtaagccgaatgtcggtgtattaatttaccttgggaaatggaactgacagtggaaacagacactcctctcccttcgctgggacccgctctccttggaagccacatggaagccaggttacaatcaaaagtggagtcagaggacgggagttccttgtttagttgttactttaaatacattaatgtgttcctgcagtctcaggccagtttgagagctctcagatacaatcctggatattaatttattttttaagtttaactctcagagtgcaatcttattcccaaatcctggagtggtgtggagtggggtgggctacagcgacatgcacctggtcaccctccctccaggtgcagtctgtaggtagagctgagctgggtcagttccaaactgaccacagcctcaatgttctccaaactgctgacccacagggattccagcccctcctgggagttatctgacaggtgctgggatgcctcttccttccacactagccttgactgcacatgccaagtgcccagtttcctaccattagggcttctttccttcgatggcagcattagcagtgggcagccgagttggagaaggatcctgtgggaaagttttccaggcaggcactgggctcagagggaacagcatccagaaaagagaagaaatctacactgcttggcatctaccatggactcaataccacctaacataggttcataagatacccttggggaagttattgttacccccattttacaggtaaggatattgaggatcagagactggcttggccaaagtcacaaagcttagtattggctgagccaggatttaaacccaggtttttctgatcttaaagccccaaatctctccacctcacagtgcccattctctgacaatgtctcatcattttgcaaagcagctccagtcctgagatggcactacttgggagaagtggaaatgcacaggtccctgtccctggggatcatgaggaaccccagacaccaaggctgggcccagtcttctcctagtgctggccctcaaatgcctcccgctgactctctccccttcccacaggagtgccccagtggtgtggtcaacgaagacacattcaagcagatctatgctcagtttttccctcatggaggtgagtctgaccttgaaatctatcttgcccagctccctctctggtaagcagccttcccttcctccaagtcctctcttccttgccatttgcttccttctcgaggaagagacaaactcagggcaggacacctccctcatcgtgagaggtgggagtctccaaagctttagcaggaaagaactctgaaaatgaacccaccctggaaggggaagaagggctgataatgcaacatcacaacgtctcagaacagctctagaaagcaggtattataatcccagatggagtaactgagtttcggggaagataagcagtgtactcaagattgcacagctggtgagtagcaaaccaggattagattccataagggtctgaaacaggttttgccatgctggcaccaccattgtgcagggcacttttgaatcttttccttaaaatagctgagacaagctggaattttgtaaaagaacttcagtaaataccgaagactataaaaataaactaattgaaaaagaggcaggaaacataaagttgtgcttattaagccagtttacaagtgtgccaggcccacaacagctgctctgttgccctgcccgactcctgtgggaaccagctgtgtccccatgggcctgggaccacatcggtgactcctcctgtggcctccatgtgtcacatgccactttgcatcctgtcaccaagagctgtctcctgcaagacatcttccctggatcctgacaaaatgcaaatccaagtattccaaacacttcttgggccctgtttctcatgggcctttttggcagcagacagatgccttccttggtgtgtggggcccctacccagatcaggtgggggaggcagttttgtcccatgcaggccccagaattgcagtttgctgagttccactgagccactgtttattgagttctcactgtatgccaggcacagctgtagtttaaaatactttttaaaaaatttcaagagataggtcttgctacatcccattgtagagaggtaggaaagggaagctcagagaggtcgtgcttgatgcccacagtcacatagcttatgtagtacagcggcatccaagttcaggtctctctactctggagtgagtgctcatcccaggcattcatggccgttcagaagaacattgtcatgcagtcactgtgccattcatacaccaacgactccatgcatagacaggcaggagaatggttttctcatgatggctagagggaggggcaagggctcatctcactttttgctagatctaacttcacacccaaacccaaagagttgagtcaatgggccccactccataattttctcctttccatcaccctagcatcactctcctctctttcttgtcgaagccctgccttgtttggaaggttctccctgtgtggaattcctgcccccatcacctgccctccttttctgccttgtagatgccagcacgtatgcccattacctcttcaatgccttcgacaccactcagacaggctccgtgaagttcgaggtacgctcatctggggtccactctaggggtcctctggttctgcatcacctccccctctaaatctcaaggcattgggggaaggtctggaccatcaaaagctctcagtcagaccaaagacatgtttatccatttgtaagcatttcctaaagatggggaaaagcagcagcaactttccctggcctgcaggaactcagggactcaggggactaataacaacagtgtatgagcttccgggcacactgcttcccagtggcagcccctgtacttagggctttgtatgtattaattcatttactccaattcccacaataaccctatagggtagggttttattattgattacctttttacagaagaggagagtaaggcaaagagagatagagtagttttcccaaggtcaaagagcacataaatgataaaggatggatttgaatgtaggcagaatgaccctcaatacagactgttcctacagtccacgtcctcagccactagaccatacggccactgggatgatagacagaccactgcagccatggataaggcaaaaacagggctggctgtgttgatctgtgtctctcagagctccattcttcctcaagggggcaccttgcaaaaaaaaacaaaaaaatggggcagggtagggaactgaaggcaggagctcttcacagagcatagccacatcctccaggcagacaagaggacgcaggaggcaccattctgtgagagtatcacagtctgacccaaagacacagcttcacactgtctgatggcttgatggttaatgtcactctgccttttccccttctcaggactttgtaaccgctctgtcgattttattgagaggaactgtccacgagaaactaaggtggacatttaatttgtatgacatcaacaaggacggatacataaacaaagaggtaagtgagctggggccaggggtgtgagagggctccagtgaaggtaactaacccaacagaaaacagccccaggcatgaggatagcactgtctgaatgaggcaggctctgctttggggctaacagagctggtccctggcaaaataaagaaggcctccctcattgccctaccctgccctgttcccaagcgcccagaaaggattaaacagattcattctcactgggtcacctagattcagtagatattacacagtggataaaaatgacttgtttcagtgtgaagagttactcttccctagggaacctgcatttgggaaggttaggagccacaagtcaaagctaaaagttgaaatggtggaattgtaggcagcacctagaatagaaaagaaagatttttaaggaagaggaacctacaattgggtcatattggccttaaactattttgcctattaatacaaccgccaagggggtaatggaaggtacagctgtctttacagaaattatcacaaataatttctgaatcttcactgctttgcacttttagaacctcagaggacatgtctctagccagtgaaataccctcaggtctatctcaaaactcactttggtatccactgtatcctggtatctcagtggaagctggaaattggcatcctgtaacactccacttgctgagctcctgtgtgccaggcacggtgcctggaggtatagatatcagcaccaatcttcacctcaacccggcaagcttctctctgtaagctcagagagtttatccaactttcattcctcattcatttagtcatgtttttaattaacacagatttgaaggcttattaggtgttctaggtgctggaggtaaagaggtgaacaatcagactaggccccacactggagcagcatagagagatggacaataaacaggccaaaaaggaatcagcaggtagaagatattttggcagggaaggttagcaaaggcctctccaaggaggtgtcgtcatactggaaccagttatacaaaaagccaggaaaagtgttccaggcagaaggaacagccactagagaggctttgaggcaagatagagcttcatgtgtttcaaaaacagaaaggcttcagatggctgcagatgaaggtatgaagctgaagactagtgcaggatgagcctgacaggtcagcagagtcagatggtggagggctagggtaaggggcccatccatattcccctgggaagctcttagatgaacatgttttttgaaagacacaaaaggcaaaaacagacttaaaaagaatcagaaaatctgactagctctgtattatttagagaaattatattcacagttaaaaaccattcccaaataaaattataggcccagatggtggactggtgaattctaatatcaatcctacaaaaaaattttagaaaatagaggaggatggaacatttcccagcttgttttataagtccaatagtaccctgatacccaaaccaaagaaaaaaaggtcttatgaaaggaaacaactacaaaacagtctccctcgtgagcacagataaaaaagctttcactaaatattagcaaattgaattcagcaatatataaaaaggatgatacaatacaactatgtgagttttattctaggaaggcaaggttggtttaacattcaaaaaccaatcaatataattcactatatttaaagaaaccaaagggatatagactggaaaggaagaattaacactgtctttatttgtacatggtataattgtattaatagaaaaccctaagagtctacaaataaactgctaaaaataataagtgaatttaacaaagtgaagacatgagttctatttacaaaaatcatttataattctacatccaacaagcaaccagaaaattaaattaagaaaaatagcatcaaaaagcacaaaatactttgagaaaaattcaacaaaacaggtgcaagactcatacactgaaaactataaaatattgctgaaataaagtaaagaactaaataaacacagagataaatcatgctcatgggttggaaggcccaatatagttaagatgtggattctccaaatttgatttatagatttagtgtgatctcaatcaaaatcccagcaggtattttgtagcagttgatatgggaatgcaaaaaacctaaaataaccaaaacatctgaaaaagaacaaagttgaaggactaaacctaccttacttcaagacttaatgaaaatgtgcagtagtcaagatggtagggaattggcataaggatagacatatagatcaatggatcaaaatagagagtcaaaaaaactaaaagtagagctaccatatgatccaacaatcccactgctggctatataccccatgtaaaggaaaccagtatatcaaagagatatctgcactcccatgttttttgcagatctgttcataatagccaagatttggaagcaacctaagtgtccatcaacagatgaatggataaagaaaatctggtacttatacacaatggagtacttctgccataaaatagaatgagatttaatcatctacaacgtggatggaattggaggtcattacattaagtgaaatgaaccaggcacagaaagacaaacatcccatgttctctcttatttgttggatctaaaaatcaaaacaatatgaagatagagggcagaaggacggttaccagaggctgggaaggatagtaggggggctgtgggggaagttaggatagtcaatgggtacaaaaaaaatagaatgaatgaataaggcctggtatttggtagcacaacaaggtgactgtagtcaataatttaattgaacattttaactaaaagagtgtaattggtttgtttgtaacacaaaggataaatgcttgaagggatggatacccatttttcatgatgtggttattacacattgtatgcctgtatcaaaacttgtcatgtaccccataaatatatacacctactatgtgcccacaaaaattaaaaataaaaaataaatattttttaaaaatagagatagacccacccatatgtcaatgcaacagatgccaaaaagatcaaaggggaaagaaccgtgttttcacagctgtatatccatttggaaacaaaaatggacattaaccttaacctcatgccaaacataaacatcaacttggaatggattatagacttaaatattaaaacaaaagctgttttcttaaggaatacataggagaaacattcttacaactttggagtaggaaaggataaggaatcatttcttaaagtagataaatttgactttatcaaagttaaaaattttgtgctttagaagacacctttaagaaaatggaaatgcaagccatggacttggaaaaaatgtttgcaaattatataccagatatataaagataccaggataccaaaccaatataaagactggcatccaaaatatataagggacatttataatttaatacaaagataaacaacttcatataaaataggcaaaagatttgatgagatatttaagaaaagaagatatatgaatggccagtaaacccatgaaaggttgctctatatcactggtcttcaaagaaatgcaaattataactataatgaaatacaattgcacagaatggccacaattaaaaagactgataataccaagcattggcaaagatgtggagcaatagaaactctcatagatagctggcagaaatgtaaatggtacaaacacgttgggaaacattttggcatctttgataaagctcagcacacacttaacatacaacccagaaatcccattccagtcaggcatggtggcttacgcctataatcccagtactttgggaggctgaggcaggcggatcacttgagctcaggtgttcaagaccagactgggcaacatggcgagacactgtctctactaaaaatacaaaaaaaaaaaaaaaaaaagccagacatggtggtaagcacctgtggtcccagctactagggaggctgaggtgggagaattgcttaaccctggggagtggaggttgcagtgagctgagattgcaccactgcactccagcctgggtgacagagcaagaccctgtctcaaaaaaagaaaaaaagaagaagaaaagaagtcccactcctggatatttacccccaaaagaaaaatatgtaattccataaagacttgtacaaagatgttcatagcagctttattcatagtaatctcaaaacttaaatgacccaaatgtctgtcaacaggacaatgggtaaatacatcatagtctgttcatccaatggaatattactcagcagtaaaaaggaatgttatagttgcatgcagcaatgtgtatgaagctcataaacctcatgctgagtaaatgaagccagacgcaaatgagtttacactgttttactccatttacatgagattttagaaaatacaaactaatctatagtaacagaaattagatctgtggttgcctggtgtcaaagcttgagaggcactcactgcgaagaagtgtgaagggatgtcttttggttgtgaaaatgttctatatcttgagtgtggtggaggttacatgggtggatacatttgtcaacattcatcaaacagtacacttaaaatgggtgaatttgttataagtaaattatgctccaataaatttgatttatttgttgaaaaacttggtgtaagggggaagtgcctaaccaatagaagacactcaaaaaatgtgttgaaggaaaaaaatcctgtgaaataaagcaggtaagagaaaataagaactcaatatcatccaaaatatagattacaaatcctaaatgagataataggaaattaatcccagtgctctgtttaaaggctcatacctgtaatcccaacactttgggagactgaggcaggaggatgggttgagcccaggagttcaagaccagcctggtcaacatagggagagcctgtctcttcaaaacaaaaatttaaaaattacctgggtgtagtggcacgtgcctgtgctcccagctactccagaggctgaggcaggaggatagcttgagcccaggagttcaagcctgccctgagccataatcactgcaccacactccagcctgggcaacagaacaagacccttcctcaaaaaagcaataaaataaaataaagaaatgcacatgactaacatagggtttattccaggaatgcaggaatagcccagtagcagagaaagcctattaaataatttatcacattaatatatcaaaagatcaaaccatttgatgctaaaatcacatttgatataatttaccatttattcataataattttcaggattcaattaattaggaataaaatacttcttcagcataatagaaaataccccagcctggtacacagcttcatactttatggtaacacgcggagattctcactgaagaaaagatgaggcaagaaaagatgatgaagaaaagatgaggcaagaaaagatgatgtctgcacactgtcagacatcaccactgtttaacatttcctgaaagctcttcaaacacagtgaaacagaaaaggaaatgcgatctaaataggaaaaattacaacattccttgttaatgacatgattttctatctgagaaaaaagacagcaagaaaatcaacttaaaacaactagaacttttaaaaagctggcaaagtgactggtaataaaatacatatgcaaaaagaaattgtgtagccaatatatcagttgtgactagctagaaaattgtaatacaaatattctcattgtgatcacaataaaatttaaagcacatgggcatttttaaatatccataatttagatgaagagaaagaaaattttgataagtagagaaacataccatcttctgaaaggatgtatattataaagatagcaatattataatgacagcaattcttctctaattaaatttattttattttgaatcaaaatggaagtgttatttgggaaggaaatttggcacaattgttataaagttacattggaagattaatcagatgaaaatagcaaagataattttcaaaaagaagaaaaatggtgggatttgttctaccagatactgaaatatattataaagctgaaactattaaaatattataatatcagagaaggaacaggtagatcaatggaacaaaatagaaatcccaggtacaaataccatcttggttcataataaagggagcatattgaatagagaggtaatgaatcattaaatgattcttggaaaactggttaactattttggcaataagtaagtaaatattcttactcggtaccataaacacaaaatcactatagatatgtacagttgctttttaactaaaaaagaactaaaaatcatatgtgaatatctgatcaaagaatggaaaaagcataaaatcaaagttagaaacaattttttaaattattgatggctttacactgtaaatattttaaaattctgcatatcaaaaaataccataaacaaagttgaaaagtaagtgacaaacttgtttttaaaaatctgcaatttatgatgacagaaaggattgatattcctcagtagacattcatcttaacaaaggcaagagtcatattcatcgtgcttatctttgtatttctttgacacaatatctagcacatggtagatgcgtaaaaatacctttaaataaattaaaaatctattaagatattttaacaatttaataaatctacacgaatatataaagagctctcacaatccagtcagaaataggtgaacacaatgagcaaagcagatgaaaaaatagttcatgggaaaataaataaaaatagtcaatacatatattagagacctcactaagaaagtaatgtatatctttaaaaacaatgaattatcacttatctattaaattgcaaaggttttgtaaagtctttgttgaaggttggtggaaagtggtttttcatacatagttgctgaaagtgttctgataataaactttctaaaaggtatttgaggaatatgtatcaaaagcattgaaagttatgcatcccattctccttataaaaccacaccttggtatatgtcccaaggaaataaagaatagacacaaagacttaaaagcaagaagagtcttcaggtaatagtgccccagaatgtgatagccatgatatccactaacagcagatttgtaaaatgaattacagtaaatacatataatggaatagccagtggccacttaaaatcatgaaagagtaatataaaataaacattagtatgatatattaaatttttaaatatattacattttaaattgataaagtggtatgtatgatatctcaattttataaacaactaaatgcttatatacacatgcaaatatatgatactctaaaatattcaaatactaccttgcaaaacatataaagaaaaaaatacagaaataggatttagttggtcttcaactttggttcactcattattccatcactgaataaacttactagtgcctactccctttttgtaatttgcaaactaggcagaattctccccattaatctatcagacctctctggagggcagagttaataaagtaccccttaaaagaaaaagaaagtgtggataagtagcttctcagaaaagatagcaggatcttcccctggcaatcatttggagataacctcatccaagttgtaggctatgaaaatcctgagagagcaacaaaattgctctttctgtgattaaaaaaaaatatcagacaggaaaagcatcaatggccatgtagatgtgaagggcttgtaaagcacacatttaaaaataaacacatggatagagacatctatttcctcgttctatctgttgagggcacctcagagcaatgacatccctgtagcagtgagcatactagtacctagactttgatttctaaataccattcttcgataaacagaaccagtcttcttgaagaatagttgattctaagattgggaaagagaaaatacaagatgagcctggagtactttattatgctgaaggtataaaagtgcttaaaaaaaaaaaactgcaggagtcaacctgaaggagttcccaatagtcagaatgaaagcaatttgagcaaaattaaaaattattaagtactggattataacctgtaaaatatggtaaatgcccacaagtccatgctaatgtaaataaacaactgaatacataaataaatgcaggagagaaggtagctcttccttacagaagaattgtaattaataagtatagaaggaataaaggaaatacaaaattaccatcaggcaaacactacagtaataatttttgcaggcaagatccactgaaagatactaaatcagtaaggaaacttgacagacaccaccttaatcaagtgatcaaggttaacattatcagtaataagacatctcaacactatgtaactccctgatatgacgcactgagaaggttataccatcacttctgtggtattcttgccagaaatgcataacttcaatctaatcataactaaaccagggattaactcaaattgagagacattctacaaaacaactgacctgtactcatatcaaaagtgtgaggtcctgaaagacaaggaaacaaagaaactcaggctgggcatggtggctcatgcctataatcccagcactttgggaggcagaggcaggaagatcacttgagtccaagagtttgagaccagcctgggcaacatggcaaaaccccatctctacaaaaaattagccaggtgtggtggcacttgcctgtagtcccagctacttgagaggctgaggcgggaggatcacttgaacccgggaggtcgaggctgcagtgacggggattgtgccactgcactccagcctgggtgacagagcaagaacctgtctcaaaaaaaaaaaaaaagaaaaaagaaaaaaagaatgagaaactcatacagattagaagagactaaggagacacaacaaataaatgcaatgtagaatcattgaagggaaaaaaatattagttgaaaagctgagatcccgccactgcactccagcctgggccacagagcgagactccgtctcaaaaaaaaaaaaaaaaaaaaaaaaaaaaaagaaaagctgataaaatttgaataagccctgtagtttagttaataatagtgaagccatgttaatttcctgggtttggtcattgtgctctggttatgcaagttgttaacattagaggagactgagtgaaaggtatgcatgaactctctgtactaattttgtaaattttctgtaagtctaaaattattcataatatgcaaaaattaaacaaaaaataaaataaaataagcacatggaatgagactgtcccctgggtctctgtagaaaccaggtcaaacatcccaaatgctcttttacccccattctgagttgggccagaatggtcagaataatggttcccaatgtaccttgataaacacggaaactctcaggaccgagtcctaaggttctctgattcaataggtttggagtggacttgagaactgatctttttaataagggcctcagtctgtggaactattggcctcatgtgccctgtggataatcttggctgttggttcatttttcttaactgaaaacagtggcagaaactatggggatttttaaatctctaggctagaacattaactttttaaaaattcagaatagtattttatttgcctcaagcctgtgaatggggatcccacaaatcaccccccactgaagacaatgcccataacaaggtaacctacccatgagcttctgagggatttaggaattgtctaccatctcctctctaagaagggctcccacaatatatccccttctgcttgcttctaactccctatcacctgctaaagaaggacctcaccttttaatcactttcattgccaaggggcacaaggagccccaaactctgtcacctaggaagagcttgacctcatggtttccacactgtgtgcttttatgtccctgctccaggagatgatggacattgtcaaagccatctatgacatgatggggaaatacacatatcctgtgctcaaagaggacactccaaggcagcatgtggacgtcttcttccaggtaagtgcacacaccctgcacatgagctgtaagcccagcctagatcaagtcaacccacgagcatctgagcaaatgatttgtgtccaaccctgtactaagcatggttggtaacagaaaagaattataagatacattgtcctcaagaaacagatgatctccttaagctgcaagtgtacatgacagaagagaacaagaaagtatattattaaacgctagtggtatagtatgaactctaaatccataaaaatttggggatcagggtaaacacgaaagacttcattaattacaactgtggaggtgttaagcatttgtgtctgggaagtaaggggaaataagattggaaactaggatagggccagattatgagacctttaaatggaagagtttggccttgctctggtacaggatgggcagctagtgctgatccttgactaagggagtggtataatcattggggcattttaggaaaaaattaatctagcggtggagtatcagagaatatcaagagttcactctagttcaacctcccactttgcagatgggaaaagagagtcctctctggccttgtgcaagtttgtacagcaagtaacaggccagaatcagaacctcttttgcccagtgttctgccagatggacagggtagcagggagtctacagaagaagcagaataagccagcagtgaggtgatgagtgtccagagcaagtcttttgatttaaggaagctcatggggctcaaagtgttgtaatcaggacctaattggagttgtctggccagtgaaagacaactctcattctcagggcaaagttggttaatgaaatgaatgaaatgagctccagctcgttactctgagctccagcaagaaagcaggggagtaagctttggaatggagatcaccagattctgtaaagtgctttctgttatgtctttcagaaaatggacaaaaataaagatggcatcgtaactttagatgaatttcttgaatcatgtcaggaggtaaggagagatctcagggcacaataactctacatctgggaaaggaaacctggggcctggggacctgcagaaggaaggtgatgagaaacctgcacatacctgcaacccctcccatcagagccaacaacaccagcaacaactgtgaagtccacagttccactcctcaacctgacctgcagttggtcttggctaagcacaagactgaacagagagcctaagtaggggtctgggggcatgtgaaaactcagagggggtctctgtgaaaatagacttcccgagagggcaacaccattattttttagcctgcctctggcttgatgacccatttcccagactacaaggaagcagctggggggaaaaaaacctacaattgtgtgattctcaaaccacagtgtgcataaaaattgcctggaatgattctgaaaatgcatatttccaggcctcaatcccagagactctagatctgggtcactttaacacaaatgtcctggaccaatgcttctaacactttaatgtgtgaaacaatatccttgatgattttgttaaaatgcagattctaattccataggtctggggtagggcctgagatgttacttttctcacattctccccagtcacactggtgatgctgatcctgggaacacaactttcattaagtctaaccaatagaccagccccagagtccaccagagactgaactggaaataattgcttcatctacttttgagaaatccatttgtacccccacattattttagaaatgttcagagttactctgagctccagccaagaagaatagcaaatgtaagaaagccggggagaagttcctagcagatactgagcccccatcaagtttcaagcacatacataaacatcacagccaccctgttatgtagatgtcctatgtgcagggtgatatccaagatatttaacaactagaatggaatgaacactgacccccttgggggtgagttctcactgttaattcccttgagagctggttgtaaaacagcctggcaccttccccacctccaaccttgattcctctcccaccatgggatctctgcacacccagcttcccttcacattccactgtgagtggaagcagcctgaaaccctcaccagatgcagatgcccagctgaactttccagctgccagaataatgagccaaataagcctatactgacattaaccttttcatttctgatattgataatttgaaaagcagtcttaataagcatttatctactttattgatttttttgaaagagagcgctttggggggttttcttactgtatgtctctattgcatgttctgtattttacatttttctattatttcttctctgaggtatagtattgaatgtagaaaaatcctcaaatgttcggtattaagcaatacacttctaattcatggttcagagaagaaaatatctcgaataaaaataaaataaaaatatgacttatcaaaatttgtaggatctaaagcagtattccaggaatgcaaggttggtttaacattcaataattggtcagtgtaattaatcacattaatagaataaaaagagaaaaaatataatcatttcagtggatgtaattgttcagagcttcttaaaagaagcaactcactattttactagatgatttgtttcttctgaattcctctttaaggctacaggtggtgcttcttactttgaactgatcactttctaggtccccacccttacttcttgtttttcatacccttgtagagttttctccatataggaaacccatgcttgacatttgctcaccagagttacagagctctcagggaggagactcagagttctaaccctcttgccctccttttttcccaggacgacaacatcatgaggtctctccagctgtttcaaaatgtcatgtaactggtgacactcagccattcagctctcagagacattgtactaaacaaccaccttaacaccctgatctgcccttgttctgattttacacaccaactcttgg

SEQ ID NO: 2 - protein, 216 aa, homo sapiens
MGAVMGTFSSLQTKQRRPSKDKIEDELEMTMVCHRPEGLEQLEAQTNFTKRELQVLYRGFKNECPSGVVNEDTFKQIYAQFFPHGDASTYAHYLFNAFDTTQTGSVKFEDFVTALSILLRGTVHEKLRWTFNLYDINKDGYINKEEMMDIVKAIYDMMGKYTYPVLKEDTPRQHVDVFFQKMDKNKDGIVTLDEFLESCQEDDNIMRSLQLFQNVM

SEQ ID NO: 3 - DNA, 648 bp, homo sapiens
atgggggccgtcatgggcaccttctcatctctgcaaaccaaacaaaggcgaccctcgaaagataagattgaagatgagctggagatgaccatggtttgccatcggcccgagggactggagcagctcgaggcccagaccaacttcaccaagagggagctgcaggtcctttatcgaggcttcaaaaatgagtgccccagtggtgtggtcaacgaagacacattcaagcagatctatgctcagtttttccctcatggagatgccagcacgtatgcccattacctcttcaatgccttcgacaccactcagacaggctccgtgaagttcgaggactttgtaaccgctctgtcgattttattgagaggaactgtccacgagaaactaaggtggacatttaatttgtatgacatcaacaaggacggatacataaacaaagaggagatgatggacattgtcaaagccatctatgacatgatggggaaatacacatatcctgtgctcaaagaggacactccaaggcagcatgtggacgtcttcttccagaaaatggacaaaaataaagatggcatcgtaactttagatgaatttcttgaatcatgtcaggaggacgacaacatcatgaggtctctccagctgtttcaaaatgtcatg

SEQ ID NO: 4 - DNA, 214 bp, homo sapiens
ggcttcaggggtgcatccgtcactcagggttcattcacccaggcaggctccaagttcctggggtgcacaaggtgggcactgtcccttctgggtgctgacagcagagcctggctcccctccgccaccatgagcggctgctccaaaagatgcaagcttgggttcgtgaaatttgcccagaccatctttaagctcatcactgggaccctcagcaaag

SEQ ID NO: 5 - DNA, 107 bp, homo sapiens
actcagcatcatcaagactggagggacagagcatttgaatcatcagacgctgggccagacgtcaccccacgcgttttctcattttatcgtcctaagaagcccagaag

SEQ ID NO: 6 - DNA, 72 bp, homo sapiens
cctgaatgcaatttgcaatgaggagatgatttgattttcttcagccctagacctccagcttcctgagagcag

SEQ ID NO: 7 - DNA, 91 bp, homo sapiens
gggttccccaggagaccacgacagaggcctggaacccaagttctaatcccacatcctggctgggcaacttcaggcaaatttctaacacaag

SEQ ID NO: 8 - DNA, 108 bp, homo sapiens
ggtaggggaggggccgggcccggggtcccaactcgcactcaagtcttcgctgccatgggggccgtcatgggcaccttctcatctctgcaaaccaaacaaaggcgaccc

SEQ ID NO: 9 - DNA, 33 bp, homo sapiens
acatcgcctggtggtattaccagtatcagagag

SEQ ID NO: 10 - DNA, 809 bp, homo sapiens
ataagattgaagatgagctggagatgaccatggtttgccatcggcccgagggactggagcagctcgaggcccagaccaacttcaccaagagggagctgcaggtcctttatcgaggcttcaaaaatgagtgccccagtggtgtggtcaacgaagacacattcaagcagatctatgctcagtttttccctcatggagatgccagcacgtatgcccattacctcttcaatgccttcgacaccactcagacaggctccgtgaagttcgaggactttgtaaccgctctgtcgattttattgagaggaactgtccacgagaaactaaggtggacatttaatttgtatgacatcaacaaggacggatacataaacaaagaggagatgatggacattgtcaaagccatctatgacatgatggggaaatacacatatcctgtgctcaaagaggacactccaaggcagcatgtggacgtcttcttccagaaaatggacaaaaataaagatggcatcgtaactttagatgaatttcttgaatcatgtcaggaggacgacaacatcatgaggtctctccagctgtttcaaaatgtcatgtaactggtgacactcagccattcagctctcagagacattgtactaaacaaccaccttaacaccctgatctgcccttgttctgattttacacaccaactcttgggacagaaacaccttttacactttggaagaattctctgctgaagactttctatggaacccagcatcatgtggctcagtctctgattgccaactcttccyctttcttcttcttgagagaga

SEQ ID NO: 11 - protein, 225 aa, homo sapiens
MSGCSKRCKLGFVKFAQTIFKLITGTLSKDKIEDELEMTMVCHRPEGLEQLEAQTNFTKRELQVLYRGFKNECPSGVVNEDTFKQIYAQFFPHGDASTYAHYLFNAFDTTQTGSVKFEDFVTALSILLRGTVHEKLRWTFNLYDINKDGYINKEEMMDIVKAIYDMMGKYTYPVLKEDTPRQHVDVFFQKMDKNKDGIVTLDEFLESCQEDDNIMRSLQLFQNVM

SEQ ID NO: 12 - protein, 227 aa, homo sapiens
MGAVMGTFSSLQTKQRRPSKDIAWWYYQYQRDKIEDELEMTMVCHRPEGLEQLEAQTNFTKRELQVLYRGFKNECPSGVVNEDTFKQIYAQFFPHGDASTYAHYLFNAFDTTQTGSVKFEDFVTALSILLRGTVHEKLRWTFNLYDINKDGYINKEEMMDIVKAIYDMMGKYTYPVLKEDTPRQHVDVFFQKMDKNKDGIVTLDEFLESCQEDDNIMRSLQLFQNVM

SEQ ID NO: 13 - protein, 186 aa, homo sapiens [sequence omitted]

SEQ ID NO: 14 - DNA, 173 bp, homo sapiens
tcctcagaacaggtgcaacacagtgtgttttgctggggaaaagggatgtcaagcaatctatgacgggggtgcagggagtctggggagaaacacaaggaagtgtgtgtgtgtgtgtgtgtgtgtgtgtgtgaatgtgtgtgtgtgtgagagagagagctggtgtttgtgttcca

SEQ ID NO: 15 - DNA, 333 bp, homo sapiens
  misc_feature 88, 164: n = A,T,C or G
ggaatgtgccaagacattctttagggttggtaaccagagacgctattttgtccttggtggctaagaaatcacttttctgactgaaggnccatttgacttacttcttttaaattcaggggaatgggtgggcatctccatgattcaggtaaggaaaaatccaaggnaaataaacacacacacacacacacacacacacacacacacacggagtagaaatttttagtgcaattttttgtctcacagcattaattaattgcagggatataactaccttggcagaattttttctccccaacccaccaccccccggaataagtttggctcttttcagct

SEQ ID NO: 16 - DNA, 166 bp, homo sapiens
tgcccactcataagatgctgaggttacaactgttaataagatattaagatactgtctttttcttcctctttctctcttacacacacacacacacacacacacacacactttttgggccaactggaaattcatacattctccccagcactggagctcaaagcgtctg

SEQ ID NO: 17 - DNA, 333 bp, homo sapiens; identical to SEQ ID NO: 15
  misc_feature 88, 164: n = A,T,C or G

SEQ ID NO: 18 - DNA, 166 bp, homo sapiens; identical to SEQ ID NO: 16

SEQ ID NO: 19 - DNA, 360 bp, homo sapiens
ttgttgttgttggtggtggtggggtgtgtgtgtgtgtgtgtgtgtgtgtgtgtgtgtgtgttcgagacagactctcactctgtcacccaggctggagtgcagtggcacgatctgggttcactgcaacctctacttcctcagctccaaggatcctctcacctccacctcccaagtagctgggactacaggtacgcgccaccatgtctggctaatttttttgtattggagagacagggttccaccatgttgcccgggctagtgttgcactcctgagctcaggtgatccacccacctcaacgtccccaagtgctgggattagaggcgtgagccaccacgtctggcctatacactatagagttt

SEQ ID NO: 20 - DNA, 212 bp, homo sapiens
tctggacaggaccaggagttggctgctgtcagcctttgccccacctctctgtggctactgggtatgtgaatctctcaaggcctgaagagaggacagctgaggaatttggaaatcctaaaacacatgcatacacacacacacacacacacacacacacacacacacacacttttctttcccttaaaaaaaaaaagattcattcaccgtgtgca

SEQ ID NO: 21 - DNA, 347 bp, homo sapiens
ctgtctacactacccacccattagtcacttattagccctctgaattactggattgaaaaaacatagtatatatatagggcttggtactattcacggtttcaggcatccactgaggggtgttgcaatgtatctcccacggataaggaaggactggtatattaacacttttatttgatttacaaaataaaggatagtttatatagttctgggtaaaattaattaattaatttaaaaggaaaaaagataaaggcaaactttaagcttgttaaaaattaagtaaaataatttggattatttaattggacaaagaggactggctttgccaatgaaacaatatggccgacatg

SEQ ID NO: 22 - DNA, 195 bp, homo sapiens
ggaccttctttctgccctaaaaccgcaatatcattataataacaaatatatatatatatatatatatattttttttttttaaaacaatcttgctatgttgcctaggctggtgtggaactcctggcctcaagtgatcctcccacctcggcctcccagagtgctgggattatagacatgaactaccatacccagcca

SEQ ID NO: 23 - DNA, 308 bp, homo sapiens
cacagccatcaagtttccaacttactgcctcacatattaagatgatttttttaaacaaacttaacaggcgatggatactccattctccatgatgtgcttaattcacatgcatgcttgtatcaaaacatctcacatactccataaagcctgtaatcccaacactttgggatgccaaggtgggtggatcacttgagcccaggagtttgagaacagcctggacaacatggcgaaaccccatttacacacacacacacacacacacacacacacaccacacaaacaaaatgaaacaaacacctaaccaacaa

SEQ ID NO: 24 - DNA, 305 bp, homo sapiens
tcctaacggctgctaccactaaagatcttagcatggtgtgtgtgtgcgtgtgtgtgtgtgtgtgtgtgtgtgtgtgtgtgtggtggggctattcagtaaggctagaagtgaaaaagctagtagaaagcccatggtgatggagaatggaggaagactgattagggagctcctcagcagtataaggaaggactaagagcacataaggacaggatcatagaattccgcatctcaggatttttgaggctgccactgccttagctgtgaggccagtgcatataagaatagtttgcacagttctgctgtgg

SEQ ID NO: 25 - DNA, 370 bp, homo sapiens
cctctgggattagcctctcagggtacagatataacgatgattgagttggcttatgtatgtgtgtgttgtgtgtgtgtctgtgtgtgtgtgtgagagagagagagagagagagagagagagtgacagagagagaatgagagagaactggaagttgtcaacaagaagagtcaaactctgtaaaatatttgaagagatttattctgagccaaataggagtgccacagccccgggagatcctaagaacatgtgcccagagtagtcaagctatagtttggttttatacattttagggagacataagacatcagtcaatacatgtaagatgcacattgatacactggtttagtagggaaaggtgggacaactcgaa

SEQ ID NO: 26 - DNA, 251 bp, homo sapiens
ggtgccaattaaatccaacaaggtagctgagtgtggtggtgcacgcctgtagtcctagctatgcaggaggctgaggtgggaggatcacttgagcctgggaggtcgaggctgctgtgagctgtgattgcaccgctgcattccagcctgggagacagagcaagatcctgacacacacacacacacacacacacacacacacacacacacacacattccaacaaggtaatgtgtaggaggaagtacccgagctt

SEQ ID NO: 27 - DNA, 335 bp, homo sapiens
caactcctgcagccctttacgccaagcacagaaatccaggaggcagagcctagcgcttgatgacatggtaattgggcctggaagtggggatttctgtcacttacctctccttgaaaaataatcactattgccaacgcctggttaattagcctgattcaattctcttcagcctcattttgctcaaatctaccagatttgtggtgctccttggtcctccaccacactttctacccctcatcccactttgtgtgtgtgtgtgtgtgtgtgtgtgtgtgtgtgtgtgtgtgtgtgtgtgtgtaggacatggccaggaatcctgactggcttcctttaaa

SEQ ID NO: 28 - DNA, 167 bp, homo sapiens
aagaccaccctcctgttgtgctctcctgaaatgtattcatatccacccatacacacacacacacacacacacacacacacacacacacacacacacacacacattctctctctctctctctttctctctctctcttaaatgtcagttttctcttcctgctttccaga

SEQ ID NO: 29 - DNA, 255 bp, homo sapiens
cttgacattcagggccttctgagtacatcatcttgtcaagaaacactgaactattcagtacacaacaggtcagaggtgcccatttgatagcctgaggatggaatccttattgcagcattttgcgtcatgccacatatatgtgttttttcaatcctcctctgttttaaaaattggaaaatttcatacaacacacacacacacacacacacacacacacacacacacacaccccccataccacaccacaccacatca

SEQ ID NO: 30 - DNA, 152 bp, homo sapiens
agcctctgactctcctctgtggggctaatccagaaaatcttactttagaaataacaataataataataataataataataatacctcattcatctttacttatcatgtgctagtatgtttctaagccttttggcatagccttcaatgtccct

SEQ ID NO: 31 - DNA, 230 bp, homo sapiens
ctcttcccatgtcctgcttctctccttcctgcgggttgggacccagtaccctccatctctctcactcctcccctctcaaacccttcttttaggaaaggagtccaaatcgaccacttacacctcagttcaatgcaagccagtataattaataaggaacatttaagggtgtgtaagggtgtgtgtgtgtgtatgtgtgtgtgtgtgtgtgtgtagctcactctgcctctgcc

SEQ ID NO: 32 - DNA, 360 bp, homo sapiens
  misc_feature 33, 36, 72, 281, 311: n = A,T,C or G
gatcaccagggaatctagatggaatccatagtnctnccctgcaagaatgctgcaattctgtaccgtggaggngccaacagaatcaccaggctctgtgactcagtcacaacaccctgacctgcccctgtccattctccatatcatacccagagtggtcttttcaaagcacagctttgaccaattctctgtctttcacacatacacacacacacacacacacacacacatgcgtgcatgcatgcctgaaatagtatagtattgctcttaagataaacattaangttcctaccatggtacagaaaatatatgtngttaggccccgtggctctttcttttccagactcctcttacccttttgtg

SEQ ID NO: 33 - DNA, 133 bp, homo sapiens
aaatcttccattgcagaccaattaaaatttaaagattttctctctctttccccctcttctctctctctctctctctctctctctcacacacacacacacacacacacacaactctccaagcacaaagagctga

SEQ ID NO: 34 - DNA, 245 bp, homo sapiens
tgagtggatgagggagaaggataaaagtcataaaatgcctcgcaaaaactttgaggtctgcctgcctggtattacagagaagcttgcacaatacagaatgttttgtgggaaggaaggcaggcaggcaggcaggcaggcaggcaggttggttatgttttcactcttgatatctcaaagctttatgacacactcatggagtgaacataatctttgtggcatgatacaaagggactgaatcactcaag

SEQ ID NO: 35 - DNA, 278 bp, homo sapiens
agctatgatcatgccactgcactccagcctggctgatagaatgagattctgactcagaaaaatataaacacacacacacacacacacacacacacacacacacacacacacacacaactttctgtctgcccccttgctcttcctgtcccatctctgcctttcttctttcctctctttgtcaaatctccttcgtctgcctcacaaaggccagtgagccccagccgcagaccagggaagccagcaaattaggaattttcttcacaaagttttgagtagct

SEQ ID NO: 36 - DNA, 184 bp, homo sapiens
tctcccatctcctccctagctatcccctgcctggtaatcactgttttgttctctatttctgtacagttgggtttttgtttgtttgtttgtttttagattccacatatacttgaaacaatgcaatctttttctttctttgtctggtttatttcacttaacacagtgcactccaggctcgtctatg

SEQ ID NO: 37 - DNA, 377 bp, homo sapiens
  misc_feature 124, 175, 320: n = A,T,C or G
ccagaaagcttcaccaaggggcgagcatgattatgcatgagcttcttaaatctggacttcccgacagcttctcatgacaggtcttctgtggaagactccttagattcagaccatcaggcctttnaaaagcacaggaacctactttacctcgcccaactctacggatgggataggnacttacaaggacatttcctcattggattccaatgttcattctccccttctctctctcaattaatctccccctcttctctttctatctacacacacacacacacacacacacacagagagagagagagagagagagagagagaganagaaacagcttcttcacagcgggaagcaggggaagggtatctatttccggcaagatc

SEQ ID NO: 38 - DNA, 379 bp, homo sapiens
aaagtcagctagggcgactgagccagagagatggggcacacagcaagaggagacctgacaaagtgcaggtgtgtcctagagaaggcaagcgagaccactgcatgattggaataccagccaacccttgcctgttcttgttccagcaaagtgcccttttaaaataaatttatgtatatagtctctgtgtgtgtgtgtgtgtgtgtgtgtgtgtgtgtatagacatatagaaatatatattcctaattcagaactcattcgtaagtgcacacactgacatgtgtttcatgtttcccaatttatcccagagcctatatgcagtgtttggctgcacaagtaggcattaaatgcaaccactgggaatgagaatggtggccacaac

SEQ ID NO: 39 - DNA, 370 bp, homo sapiens
  misc_feature 24, 97, 104, 274: n = A,T,C or G
agctttgaaatcccatccaaactnattggcgtttcaaactgaatcccagatgttcacttactgagaaataaatgaatggcccaattcgtggactgangcagggnccctcacaaatagattccaggtgtgttggcctctggaccactatctttctctgttttacatacacatacatacacacacacacacacacacacacacacacacacacacacacacggcaccaagtccatcctgaaaagaattcaacgtcatctccaagttagagccagtntaggatgaacagaggtagttacctaacacaaataacatattttcaattgtggatgaaggcaaagggctccacattcacactcttgtgccttcaata

SEQ ID NO: 40 - DNA, 154 bp, homo sapiens
ggcatgggatgtttgacctaagagatggactaaagccaatgagtaaaaatgtaaagcgtacttagtcaaataaattcttctctctctctctctctctctctctctccttattcatcactcttgggccgtgatgatgatgagggagaggagcagt

SEQ ID NO: 41 - DNA, 390 bp, homo sapiens
tatttgcctgcctgggttagatgattctccaggcttctacacaattttatgtttatatgaaaatagccacaaagggaaaagaggacaataaaacaagagatatgaataataatgtattgtatacttgaaatttgctaaaagagtagatctcaagtgttctacatacacacacacacacacacacacacacaaaggtaatgaatgagatgataggtgttaattaacttgattgtggtaatcacttcacaatgtatacatataaaaacatcatgttttacaacctacatttatacaattcctcaattatatatcaataaacctggaaaaataaagatgtataaaaaagatttacaaataagatttttaaaaaaggattgtgaggaaacaaag

SEQ ID NO: 42 - DNA, 192 bp, homo sapiens
accagctaacctgccatgagactgttgtgtagccatcttcacctcctcatcttcagggaaggggatgaaaatatctgtgcactgcaaatgttaactatatatacacacacacacacacacacacacacgtacagtaggccctccataacctgaggttccacatctgcatattttaccaactctggtccctgc

SEQ ID NO: 43 - DNA, 242 bp, homo sapiens
ttgttcctgaatgggaggaggactggtgagtgagggggaaagaatggagacaggactgagaagaaccagaaattaaaataatagtagtaatagcctaacatgtacacgtatatgagatctatctatctatctatctatctatctatctatctatctatctatcatctatatatctatcatccatcatgtatctatctatttgcatatataagctataatatctggctctgttctaattgttt

SEQ ID NO: 44 - DNA, 249 bp, homo sapiens
ccaggcttggatgagagaataatcttaaggaagtcagcatatgttctagaaacattcagaagacaaaagagtctgttatgaaagaacaaagtatttgtaataataaattgaatgttacatggacacacccagacatacacacacagacacacacacacacagtttttcttctctctctctctctccccactcccctctctcatactttgcaaacaagctcctcagcagctggtaagctgttccctgtcc

SEQ ID NO: 45 - DNA, 305 bp, homo sapiens
tcctgactgctcaaagctcaaggtgttgcctttttcaaatgggatgcaatagcctactcattttccaagattaaagctagagagaagaatgaatgaatgaataaataaataaataaataaataaataaataaataaatgagcaaagttaatattagctggaaaaaatagggtacaggtggaaggaatgaacccatattgagagtccactatgtgtcaaattccttgcatggaatctctaaggtctgtctagcttaaaagcaatgccagccttgctatctgtacttgatgaggagatggatcggaa

SEQ ID NO: 46 - DNA, 353 bp, homo sapiens
ccaaactgcaaacccaaacttctacaatgaattcatgtgcaacttattctaaaagatctatacacacacacacacacacacacacacacacacacacacacacttcctgtcctattgctcttcactacttccttcatctctgtgctacaatctgggttcatttttcttccccttgagtaatttattatgttttttacagtgagtctgttgctcaaaaattcttttagtatttatttgtataaaaagtcttaattttgtcttcatataaaattttgtttgacactctattataaattgactgttattctctttccatgttttccggacatagttccattgtcttctgacttcca

SEQ ID NO: 47 - DNA, 267 bp, homo sapiens
  misc_feature 4, 55, 133, 189, 227, 228, 252, 259, 263: n = A,T,C or G
ttcnaccttatgggtatatcgaattgtaaccccgttgtaggtcaaggagcatctncatatatacatacatagatgatagatagatagatagatagatagatagatagatagatagatagatttaattctaaantttccaaatactctttcatttaaatgattatagttttacaacaatttcatatattntataggtaggagaattagggttttccagagaaataganncaataggctgtgtgtgtatataangatttantttnaaga

SEQ ID NO: 48 - DNA, 299 bp, homo sapiens
gttgggcatgatggtgtgtacctatagtcctagctacctgggaggctgaggcaggaggatcccttgagcccaggagtttaagactaacaagactccatctctgaaaaataaggcaaaaaaagtatgaagaataaaataacaatcacttacattccaaccacctataattaatcattgccaacacctgaggatatttgcttccaatctacaagactgcattattattattattattattattattattattattattattattattattattgagatgggggtttctctttgttgcccag

SEQ ID NO: 49 - DNA, 393 bp, homo sapiens
gcagacagggttcaaattccagcctcccctcatattagctgtgtgatcttaggcaagtttattcatgtgtaaaaagaaataataacctcttctcgtggggttgcaggttaaacaaaagagtaggtattaaaacaactaaaagagtatgattggattgtttataacacaaaggataaatgcttgaggacatggatccccatcttccatgatgtgatttttatgcattgtatgcctctatcaaaacatctcatttactccatatatatgtgtgtgtgtgtgtgtgtgtgtgtgtgtgtgtgtgtgtgtgtgtgtatgtgtatgcacacactatgtgcccacaaaaattaaaaattttaaaattaaaaaattttaaaaataaacatgctgctgggc

SEQ ID NO: 50 - DNA, 201 bp, homo sapiens
agctgccagcacacaaggcccagaggtactttattggatgccaaattcttttaacacaccatgagaaaagaagttgacaactttcccatgcattttggaaggtgtgttagaacgattcaacacacacacacacacacacacacacacacacacacacacacacatttattgggttgggggagccttaaaacttacaaatct

SEQ ID NO: 51 - DNA, 246 bp, homo sapiens
aatttcttaccctttatccccgtcttctactcccattccacatgccccccaccccccatgaatgatttgtctaatgcgttgaatatgcacgtgtggttttgggtgcatgtatgtttacacacacacacacagactctctctctctctctctcacacacacacacacacacacacacacacacacactcatgcctctcctttgaagaggatcagatatggacagcaaagggcattagcatcttagct

SEQ ID NO: 52 - DNA, 351 bp, homo sapiens
gctccaaagttcctgattccaaagcctaagttaagccatcttaacttatatttcaggtgactagtggaattttttatgcccagtgtaggtggtaatgacgatggagatatggcgatgatgatgatgatgatgatgatgatgatgatgatgatggcagtagtggtggtggtgttggtgatggtgttgaagatcaccatgtctgaccactgttgtctgtgtcctttgtacaattgttcagatgcagtgtcctggttgtcacatagatgtctctgactgttttacaggccttcacctaccaccatatccaggagatcatggtccagctgctgcggacagtgaaccggacagtca

SEQ ID NO: 53 - DNA, 364 bp, homo sapiens
ttaacccactgctcccattttgctggtggaaaactgaaaaccaaagagattaagtcatttacccaaggtcatgtaactaatatattgaatctcagatgttttaatgattttgactcatttccaatttgcctggctatatagagaaaatatttgaggaattgacagggaacacacacacacacacacacacacacacacacacacacacacacagagggagggaggggagagagagagacagagacagacagagactgaacagattatttctccactgatgttcattatttagatctattttcaacatttaaaggcaattgtcagcatagtcaattcagccattttaaaccatcaagggccaatg

SEQ ID NO: 54 - DNA, 161 bp, homo sapiens
gcaacctatttgttagcagcacatgcgtgcgtgtgcatgcacgtgggcacacacacacacacacacacacacacactctttgcaggggaattttgagccagaaatttatctgtaggcccatattcattcctttttgcacatttctattgtgaccttgggca

SEQ ID NO: 55 - DNA, 269 bp, homo sapiens
caattccacacagctggagagtaacaaagccagaaatcacatccatttgtgtgtgtgtgtgtgtgtgtgtgtgtccaaatcctgtgattccagtgccaggatacactgtcttccgtgttcaacagtcatgaaagtattttaatgaacacctggccctgcagtgcctgatgtagcaaatgctgcagatactccacccaccgactcttggaccacccaaaatccactggcagcttcagtgaggctttcctacttctttctttccctgggct

SEQ ID NO: 56 - DNA, 251 bp, homo sapiens
cactggacttggagtcaggacatcattttaacagctttatcgagatgtaatttacatgccatacaatttacccaaagtgtacaatcattgactcttagtatgttcacagagctatgtaaccatcaccacaatcaattttacaacattttcattactcctaaaaagcaaacctgcaccccttagccactgctctgccaacacacacacacacacacacacacacacgcgtgcgcacacacacccaaacactc

SEQ ID NO: 57 - DNA, 141 bp, homo sapiens
cgcgtgtacctccacatagatgtttgccaatgcctatgcccaagacacacacacatacacacacacacacacacacaggatacattcaagcacacactaatgtatgtgcacttgcctgcacagagtccacatcacacaggc

SEQ ID NO: 58 - DNA, 328 bp, homo sapiens
agcttctagtctgctatgttgctaattgtcttcttggtcatcttttaaaaccatttctgtgaaattatagcctccttactcccttaccctgagtctggatgtttctgaagatgactgatctctacagtgagaaggccctgggaattgactgactcactctctctgtctctctctctctctctctcacacacacacacacacacacacacacactcatatacatacacacatagatacacatatacatgcatccacacatgcacaccctgggcacacccacacaccctacaactgcacatgcatgcacacacataatgttaactgaagg

SEQ ID NO: 59 - DNA, 313 bp, homo sapiens
agcttttggctatggaaccttaggcaagatgttcataaaccctttaatctctagtgcccttgttcataaaaagaagtgaatcggatccctgcaggactgtttttgtattcagtgcacaggtgtgtgtgaagacacccagcatgttgccaggcacacagagatgtctaccttgatacttttctctcctcctccccgcaaatacacacacacacacacacacacacacacacactcacacactcttattttgatcttggcctgaggctgacaagccccagattagtgatcagtgacaatttcggctttatcagct

SEQ ID NO: 60 - DNA, 242 bp, homo sapiens
cgaggatgcacacctcattaattgaggagctaggatttagatccagagcctcatgattctaaagcctgttttttgtttgtttgtttgtttgttttgttttggccacactaggtttctagaaacttccagttccttcttaaaagtcctttttgggcattccggcctaaatcccaaaactgtggtctgggtacaagagagaattaggccagtgagaaaaatttaaaccaccctgccctctaaat

SEQ ID NO: 61 - DNA, 623 bp, homo sapiens
cttgatgtcttctttcaccatcccctggcacccgcctatacatttattacttgaaacagactgacctttatttggttaggccactgtggtcaggtttctgcaacatggggtcacatgccttcccaactgacacaagtctcaagctccttttctcttctttttataacttctagaagcatagcttctaccagataaggatctaaccttttcagtggaaaacaaaaatggcaaagaagtaaagaaagaagagagagaaagaagaaagaaagaaagaaaagaaagaaagaaagaaagaaagaaagaaagaaagaaagaaagaaagagagaaagaaagagagaaagaaagagagaaagaaagagagatggagagagggaaggaaggaagaaaagaaagagagggagaagaaagaagacagggaaggaaagggaagggaaaagagggaaggggagaggggaggacaagggaaggggagaggggaggacaagggaagggaggaaggaagaaaggaaggaaagaaggcaggaaggaaggaaggaaggaaggaagaaaggaaggaaggaaggaaggaaaaataactagggcctttcacttttgccttcaatagcagagtggccctggatat

SEQ ID NO: 62 - DNA, 372 bp, homo sapiens
tattggcagagggtgagtccagtgtataaaagcaactatatttgtgcaataaggcaacctctaaacacaagttactacttcatctaatgccacacacacacacacacacacacacacacacacacgagtcatctgttccaaggctgttgcctttactaagtgatgctatgttggtccttgaggtggtgccttcctgagggttttcaagcatagctttggccatgcacagttttcttcttatacacactctgaggagccccgccgtcacggtaatgcacctgcctcacaagctggtgggcagcttaaatgaaatacacattttgctccaggcccagcactagctcatcaatgtgagctggtgttagcctcacc

SEQ ID NO: 63 - DNA, 140 bp, homo sapiens
cagtagccaggaagctgaggaacacacacacacacacacacacacacacacacacacacaaacacaccccttcctggctccagttccgcaccaccccacacccccaacaccggaagtagatttctcaataggcagggctg

SEQ ID NO: 64 - DNA, 301 bp, homo sapiens
tttgccagaatgtcctcacaccaaatagtggaccccttcttttgctgatttatctgctattgtataggtgtatgtgtgtgtgggtgtgtgtgtgtgtgtgtgtgttaaggcaggtggtagtatgtgtagggtagggtttccccagtcacctggagccctgagtgcctgcttccctaaactaggccagtttagctgactggcttcctttgtgtattggtccattctgcatcaaaagcatctgaattttcattcaatctctcttctgaattttcacttttaaaaacctgaccagtcccttgtg

SEQ ID NO: 65 - DNA, 203 bp, homo sapiens
ctcctccatggtagggactggttctcttaggcccctgtatcctcaggcccagcatgcttgggaaaatgtttgctaatgctttgtgactcaaaaggaatcacacacacacacacacacacacacaaacacacacacacagtttttaatattatcagtcatatcagccccctgaggcagctgctctgttccagacaaaccctgtt

SEQ ID NO: 66 - DNA, 138 bp, homo sapiens
gggtacaggagagttgtggtgggcattagtactactcctgctgctgctgctgctgctgctgctgtgtccactgttagtgacagaagtgggaaaatatttaagttgagttcacattagtgttcccagtttagcgtgagc

SEQ ID NO: 67 - DNA, 250 bp, homo sapiens
ccatgagttcaggcagtgggttaaataagatttcccttgaagtcgaatgaaatcacaatgcaccacacacagggacacacacacacacacacgcacgcacgcacatcacacacacacacacacacacacacacacacacacacacatacacacacacagtctccctggggccaatctactgccccctgaacctcacccatcagccaggtgcctggccccgggtctgtctcttagggttacatgctcccgg

SEQ ID NO: 68 - DNA, 664 bp, homo sapiens
acttatggaacacctactcagtgccaggtattgttgtagatgccaggagtacagcagggaataaaacaacatccctgtcctcgacacaaacacacaagtaaatagagaaggtcagagataaatgctgtgcaggaaaacaaagcaaagtgagggatggagagtgcggaaggttggggcacttttgtttcagatgagtgtcagggaagcccccttggaggaggcactgtaagggcacagaatcgaatgaaaggagtatgtgaaggtgcttaaattgtttctgtttggtttggtgtggtgtgatgtggtgtggtgtggtgtggtgtggtgtggtgtggtgtggtgtggtgtggtgtggtgtggtgtgatgtgatgtggtgtgcggtgcggtgcggtgcggtgcggtgcggtgtggtgtggtatgggttgaggctggccttaggagcctgttggccttccaggccagtcctgaagcccagcccagagcaccagactctgcagtcagtcagtggagggcccacatctcagccaatgcatggctttgggtggtgacttcatctcccctagtgttcctttccccctctgcaaaatgggaatggggatggctcagaactcccagcgggagttaggaggaataatgtataggaagtatgagcagagtgcctgg

SEQ ID NO: 69 - DNA, 120 bp, homo sapiens
tgatgtgctcgttcccatagccccgctgtgtgtgtgtgcgcgtgtgtgtgtgtgtgtgtgtgtgtgtgtgtgtgtgtgtttggtggggtgggaggggaggcagaagaggaagagagggca

SEQ ID NO: 70 - DNA, 139 bp, homo sapiens
tggtgatcagctcagtgtccttggaaaagagcagaaagtggtatcacgaacatatcttctcctttgcttccttctcctcactcttcatcatcatcatcatcatcatcatcaaatatggatctgtgaggctacctctggg

SEQ ID NO: 71 - DNA, 340 bp, homo sapiens
ggaggagagaccagcattcacattcagttattgttgttttaaatccattacgcacatacataggagaaaatttcagcaacagtcaccctctgaacccagttcctcagttctctccagaggcaactaaaatgctcaattattagtgtatccttttggaaatattttatgtatatgacagtgtgtgtgtgtgtgtgtgtgtgtgtgtgtgtgtgttcctttccaatattaaaataatattaacattggtaatagtggtactaaacaacttagggtgttttttttttcatttaatagtatatttttagtatctttccaggaaaagatacatggatgtgccaca

SEQ ID NO: 72 - DNA, 362 bp, homo sapiens
  misc_feature 49, 53, 57, 259, 322: n = A,T,C or G
tcaataaatgattctggggatgtgtctgtctgtccatctgtctctctcnaganacanatacacacacacacacacacacacacacacacacacatcctgttagttctgtttacctggagaaccttgactaacatacccattaaaaccaaaatatgtccttcagggtgttaatgtttggttgaagaaacacagaagtttaacaattgtatcaggctgggcacggcctataatcccagcattttgggaggccacaatgagnggatcacttgagcccaggagttctagaccagcctatgcaacatagtgagacaaaaaaatgaanaaaattaggggtgtggtggagcgcacctgtagtcctagct

SEQ ID NO: 73 - DNA, 187 bp, homo sapiens
gagttctatggaacagcatttattgaataataacatttcaggaaaaaatataagctttactgtatattaaaatacatatatacgtttatatattatatattatattatattatatattatatatattatatatattataatatttatatattatatagatataaatcaactacaagatccagttcaa

SEQ ID NO: 74 - DNA, 219 bp, homo sapiens
ttgcctaagatctaggtgttcaaaagaatttctccaatccacttcagcctgttattatgtatgtattctgttttaaatgagaaacaagagtcattttctccagaataatagaaccatagtgacacttgaagtaagtccagtggtcctgatatgataataataataataataattattattattattattattattttgagacgaggtctgtatctgttg

SEQ ID NO: 75 - DNA, 302 bp, homo sapiens
atggagagacacggagttgcttgagggtacagtgcctgtagatactcaataaatatttgtttaattaagaaaatttctgttatttgtgtgctcatacataccatttcagtctggtgagtattgttctttcctagagtttacttttaatcttaagtattttccaggtcctttgttgacttctgtttaaaccacagtacacacacacacacacacacacacaacttttgtgtactataatagcttccccaaaattataatttagtcattgtgatgcagatcttcttccaaggcctctactttgg

SEQ ID NO: 76 - DNA, 368 bp, homo sapiens
aaacaaacaaacagaaacaccaaaatggattccagcatcttataagtgctttctcttatgatcgagagtaagacaagcatggctactcccttctcttctattaaatattgtactaggggttctattgagataaataggcaaaaaacaaaacaaaacaaaacaaaaaggcatccagatttaaaaaaaaaaggaatctaggaataaagggattacatctctacttgcagatgacatgatcttatgtataggaaatcctaaggatccactgaaaaactgttagaactaataacatcagtaagtttgcaggattataagattaatacaaaaactcgactgaatttctgtgcacttgcaataaacaacccaaa

SEQ ID NO: 77 - DNA, 247 bp, homo sapiens
tctgcccacacactttatgctttaaaacaaaaggccatgttgaacttgtagaaccaaatgattgctaattacttggggcgatactagtgatatattatcttacatacacacacacaaaacacacacacacacacacacacacacacacacggcttgagtccagcatggcctactgattttaaaataggaaatgacagtgtaaatgccaggataaaggacaaagtgctctgacctgttgccaaacctt

SEQ ID NO: 78 - DNA, 270 bp, homo sapiens
gggtttaggacccacgtatcttttgtttgtttgttgttgttgttgttgttttggagttcaacatgtttatggtgtgtagccatggttgaaagcttttattttataagatagacaaagcaggaattattattctcattttacaggagaaaaacagaagggctatgtggtttgttaaaaggccacacagacagtaaagaacacagcctttacatggtcagcctcacattctagtactcattttattacactgctcttcttctctgttgcctg

SEQ ID NO: 79 - DNA, 261 bp, homo sapiens
ctggcctctttgcccattttctaattggattatatgtggggttttgttgttgttgttgttgttgttgttgttgttgttttgctgttgtgacgttagagttccttgtatattctagatattaatcccttgccaattaatagtttgccagtattttctcccatcctgtaggttgttcactctgatgattgtttcctttgctgtgcagaaggtatttaatttgatataatcccatttatttacttttgtttctgttgcctgtga

SEQ ID NO: 80 - DNA, 304 bp, homo sapiens
ccatccagggtctaactccagcatttgtataaacttggacaatacttttgctacagggttgtcattgaaagtattgcctcattatatttcttagtggtccctgtatgaagccatataagagaaacttcttaatttagcactaggaaatgcttctgttgacttgagatgtgtgtgtgtgtgtgtgtgtgtgtgtgtgtgtctgtgtgtgtgtgtgtgtgtctgtgtgtgtgtgtattcccctaattgataaactataaaataatctttctcttttcactttggccatctggaaatttgccaccaa

SEQ ID NO: 81 - DNA, 371 bp, homo sapiens
tggcttcccaatcctagaaaaggaagaaagctgcatgttgttgttgttgttgttgttgttgttgttgttgttgttgttgttagatggagttttctgtcgcccaggctggagtgcagtcacatgatctcagctcactgcagcctctgcctccctggttcaagcaattctccagtctcagcctcccaagtagctgggattacaggtgcgcaccaccactccaggctaattttttgtatttttagtagagacggggtttcacgatgttggccaggctggtcttgaactcctgacctcaggtgacccacctgcctcggcctcccaaagtgctgggattacaggcgtgagccaccgcacctggctgaaagctgcat

SEQ ID NO: 82 - DNA, 258 bp, homo sapiens
gccttcgcagattgtacctcttcctttcacccttctcgctggcctgtgcttctctctccatcgtggtctcccacgccttggtttctcctccatccccatccccatctttcgtgagcccctccaactctctccccgtgttttgtacggtctcctgcgttcacttgatttcctctcacccacccccgccccaaacacacaggcacacacacacacacacacacgcgcacacacacgggcctctcgcactctccttctcct

SEQ ID NO: 83 - DNA, 226 bp, homo sapiens
tgactcttggcctctgtgtgtctctgggtttctttgtctccctcctctccacggtcctcttgtccttttgtcttccctttcttgtttcttgaatctctttgcctttatgtatctgtctttctctctctctctctctctctctctctctctctctctcttctttcctttctccctgactccctctctccctcttccaggcccagctcccagtagctcctaaggcaaa

SEQ ID NO: 84 - DNA, 215 bp, homo sapiens
catttgggataaatgttgtctttagttttcaactactttttctttggcttattctctctctctccctccctccctctctctctctctctctctctctgtgtgtgtgtgtgtgtgtgtgtgtgtattcatgttttcttaatctatctgaattgttgtgtcggttttccatgcgaatttccagttacctccacagtattcgtttcagaatgcttcct

SEQ ID NO: 85 - DNA, 370 bp, homo sapiens
ttgcagtttcatgaaccaagtattactgcctcaacaattaaaaacaacagacaaattatttaaaaaaccatgaggcgagtggtggctggtggctggtggcagggcgggggcagggtggcctctgtgtctcatgctttctggttggtctgtggtctttgcactgagagctagggccttgcacattcattcattcattcattcattcattcattctttgaattcaacattactatgcaccaggcgctgagaaggcagccttagacagatggaaatccttgctttccgggagattccattctaatgggtcattgattcagtggcctcttcagtcatttgttcatatgcatttactcgtacctctcatgtgcca

SEQ ID NO: 86 - DNA, 339 bp, homo sapiens
aactgaacctgggctgtgtcagtctaagacttatgcttggaacctgtaagaagaacaagtgtgcgtgcatgcatgtgtgtgtgtgtgtgtgtgtgtgtttggagggatagtgaagttttttcctacagctacaaatagaacatgctttcctatacaattgtactaatcaatattatttccttacattatctccagccatttccctataattagacattcagattatttcaaggttgttattcctataaacagtgatgtgatgaattttttaaagttggttcctcacatccgtctgttcttgtaaatgtatccatcatagaactggaccacaaaggttgg

SEQ ID NO: 87 - DNA, 150 bp, homo sapiens
gggagttctctttcttcaagtgcttaggggagaaaataagtgagaaaaagagagatagaggaaggaaggaaggaaggaaggaaggaaggaaggaaggaaggaaggaagaagaagaaaaggaaacgaaaaggaaaggaaaggaagaaagga

SEQ ID NO: 88 - DNA, 331 bp, homo sapiens
tccatgttattctctacctgttggttccttcctcattgaaaattggtgtatagatggtagatagatagatgatagatagataggtagatagatagatagatagatagatagatagatagatagatagatagatagatttttatttttggtctatctcctttactaaacagtaagctccatgaaaatatggatcatcactgtcttattcaccattatattctcagcatatggtattgtcctggtatagaatagattctcaataaatgcttgctaaatgaatgcattcatgagtgagtgaatgaatgaatatgcgagtggatgagtgtgtgga

SEQ ID NO: 89 - DNA, 370 bp, homo sapiens
tgcttgagggcaggatctatatgtaattcctttctggaaaaccagggattgaaacaggatctggcatgcaatgggctggatgggtgaatggagaaatagatgaatgacagatggatggacaaacagatggaaggaaggatggatggatagatggatggatggatggttggatggatggatggatggatggatggatggatggatggatggatggatggacagatggattggttggtagatgtgtggatagatggatgggtgaacaagcgagtagatggatgagtaaatggctaaatctggtgcttttcttccagaatcctggattctgaagggaggctttgcagcccttcctcgtggatcacttgctctg

SEQ ID NO: 90 - DNA, 251 bp, homo sapiens
ggctgaattactgggcatgtttctgagaagaaagaacttctattttaattatatatctacagaaaccaaattgcctgcttacagttttacatgtctgatgattggaagtttttgtttgtttgtttgtttgtttgtttgtttccacagactagcctctgactccatatatttcaaactttgttcctcttccactacccacatatttctgatgtgagacattctagaaaaatttcatattgcaagacggcttc

SEQ ID NO: 91 - DNA, 363 bp, homo sapiens
ttggcaggattcagttcctcatgggcaccagacggagagtctcagcaaatcactagctggtgactgcagccaccgcagttctttatcacgtggttctctccatagggcagttcacagtgtggtaacttgcttcatcagagcaagccaggaagaagacccagagacagacagagagagagagagagagagagagagagaggaggcctctgaaagagagagagaagagagagaggcaaagagagaatgagaactccagaagtcactgtcttttatagcctaatcttgaaagtgacattcatcactttcactacattttcttccccagcagtgctcagtgggaggggattatacacggccatggat

SEQ ID NO: 92 - DNA, 203 bp, homo sapiens
gcacatttgcagaggtttgaggtcccatcattagccatgcttcttggttcctgcactatgagtatacgtatgtgggctgatggcctcattcactggatacacacacacacacacacacacacacacacacacacacacacctcaccagggacttgggagtatctaaatgtttgagaatcatagagcagggagacatccaacac

SEQ ID NO: 93 - DNA, 326 bp, homo sapiens
gggcacatacagctttccttgcaggaaaaaaacctgcttaactttgtttattatatattatttgatctgtgcttcatatattattcatatattatttgatcaagttgcttcatgtattatttgatcaaggaatcatgtgtgtctacagcacctattaaaattccctggcactgaaattctgtagaaaaccatttaggaaaagttgatctaactgtataattattagtaaaacatatacacacacacatacacacacacacacacacacacacacacaccacaagcaaacaaaaaaaaaccaccttaatggtctcctaaccaaggca

SEQ ID NO: 94 - DNA, 266 bp, homo sapiens
gcatgttcgccacagagattcaattaatttaaataggtagaggacttggggcagtgcctaggacaacattacactcagggatggtgatgatgatgattataatgatgatgatgatgttgatgatgatgatgttgataatgatgatgatgatgatgatgatgatgatcatgatgataatggaaaagaagatagaggaggtagaagaggagacaatcatgatgttggaggtagactccaatcttcagaatcagaagctcagggttgga

SEQ ID NO: 95 - DNA, 224 bp, homo sapiens
  misc_feature 18, 197: n = A,T,C or G
agcttaatctattatttnagaggcagaaagttaacttgcttatcctgaaaagaagtgcaaatatatcccaaaagtgccattctttcattcatccactcaaacagatacacacacacacacatacacacacacacacacacacacccttttcaccccttggtagtgtacagtctctgagttgtaaaaaatagtcattnctttctgcttgaaagactgtattagct

SEQ ID NO: 96 - DNA, 328 bp, homo sapiens
ccagcatgatcctatgaatccttataaaagggagatgggaaaatttcacacacacacacacacacacacacacacacacacacacacacacagatagagacagagagaagaggataaggcaatgtaaccatggaggcagagatgggagtgctgtagccacaagctaaggaatgctggcagccacagatgctggaagagttgaagaatgggttccccctgagggagcacagccagatgcatgctttgagagttcagcccagtgctactgactttagacttatggtttccagaactacaaaaaattaatttctgtcgtttcaaaccatcc

SEQ ID NO: 97 - DNA, 257 bp, homo sapiens
caaacgtcgctgacctgagtctgacctgggctgcctcgtgttaccaacatgaaaagggagtgagaaaatctgaggccaattaacttctctccctctctctctctttttctccccttgcccacctctctctctctctctctctctctctctctctctctctctctctcttttttccccctcctcttcttggagacatgatgaaatttcctgaaacaaaaactcgcagcccgttcaataaaatgctttcgcctttggtg

SEQ ID NO: 98 - DNA, 223 bp, homo sapiens
acagttgccatttgctcatttaaaatgtagtgaggtgttttaaagagggtttgttcaatttaccaaaaagggaaaaaaagggaaaagaagaaacttattgttgaacgaacacacacacacacacacacacacaaagagcctggcttaatttagggataaagcaaagaagtcaatacccccacatcaactattgaaacctaagctattgctggagttgacagcg

SEQ ID NO: 99 - DNA, 364 bp, homo sapiens
  misc_feature 7, 61, 86, 339: n = A,T,C or G
agctctncctagcattgttttcctttgcttcatttcctcttaaatgtgttggatgcacttngttcctgctaactaatctatctttncagtttcaaatcaaatgaacccagagaatttatttttacattattatcttcagatttagatttgttttgcttttaatcctgtcttcatgaaggggaaagccatgtgtaccagcatggttgataaaccaccaaatcgtgaaactttgcttgctccccaaacccccaaccacacacacatacacacacacacacacacatacacacacacacacacacacacacacacacacacacacaacctgggaaattgggnagaaaactggcaaaccttaaactag

SEQ ID NO: 100 - DNA, 132 bp, homo sapiens
aagggaagggaggaaggaagaaaggaaggaaagaaggcaggaaggaaggaaggaaggaaggaagaaaggaaggaaggaaggaaggaaaaataactagggcctttcacttttgccttcaatagcagagtggcc

SEQ ID NO: 101 - DNA, 372 bp, homo sapiens; identical to SEQ ID NO: 62

SEQ ID NO: 102 - DNA, 140 bp, homo sapiens; identical to SEQ ID NO: 63

SEQ ID NO: 103 - DNA, 301 bp, homo sapiens; identical to SEQ ID NO: 64

SEQ ID NO: 104 - DNA, 101 bp, homo sapiens
gtgctcaatggctgttgaataaataaatgagaggaggaaagaaggaaacaaggaaggaaggaaggaaggaaggaagggagggagagagggagggaaggagg

SEQ ID NO: 105 - DNA, 203 bp, homo sapiens; identical to SEQ ID NO: 65

SEQ ID NO: 106 - DNA, 164 bp, homo sapiens
ttgagctgtttggcctcaatggcattttatctctctctctctctgtgtctctctctttctctttttttttttttcacattgagccatcttcttacagctgaggttttcatataaaaaagcaagttgctggtttctctttaaaagtagggcaatctggcagttct

SEQ ID NO: 107 - DNA, 138 bp, homo sapiens; identical to SEQ ID NO: 66

SEQ ID NO: 108 - DNA, 664 bp, homo sapiens; identical to SEQ ID NO: 68

SEQ ID NO: 109 - DNA, 120 bp, homo sapiens; identical to SEQ ID NO: 69

SEQ ID NO: 110 - DNA, 139 bp, homo sapiens; identical to SEQ ID NO: 70

SEQ ID NO: 111 - DNA, 340 bp, homo sapiens; identical to SEQ ID NO: 71

SEQ ID NO: 112 - DNA, 362 bp, homo sapiens; identical to SEQ ID NO: 72
  misc_feature 49, 53, 57, 259, 322: n = A,T,C or G

SEQ ID NO: 113 - DNA, 187 bp, homo sapiens; identical to SEQ ID NO: 73

SEQ ID NO: 114 - DNA, 2002 bp, homo sapiens
tggctgtcccctctgcctggagcaggctttgcccagatgtcctcctggctcactccctcacctccttatgtcttgactcagaggtcacccttccagattagactgcctgaccccttctgtgctttctgttttctccttattacaaatgaatctgcaccatatttcactgattgtgtttgctgcatgcatgagggctcacataaggatgtgctttttgtccactttgttcattgctgaatcactagcactgacagctgtacctggcacaaactgggtgcttaagaaatattcttgaatcaaggaatcaataaatgaatgttatagagaaagcaggagaatagatgataattgagaaaactgaagcccagagatgggaagtcactggccccatgtcacacagcagcaaatgcagaaccggtcctggaacttcagcctctcagccccggccctgtcctctcctgtgcttctcaccactttatgtaagttttttctttatttgtggagctctcagcaggcatttttctctctgtgctcagttggcatttttcccttgaaccagctgtgtcttcactctcttccccattttctccagaatatgttcttctgtttaactgaatgttctctttttctgcaggtctggcccaactgcaatatccagagacttttcggtgtcatatgaaagaaaaggagcaggaagccaagatgccccacctggcttctacatcagggtgatctgcatagtaagatgcaaagacactgacatatgcctgggggtaacgagggcagtggggggagggagctaagccaagataagcctcctccccaccaaacataggtgctactgagcaatgatagggggcatgctgtctgctctggtacttgcgtagggaatgctctgagaaacctcactaaatctgccctctagagtagagcaacctgggagctcaggcttccctttcctctgtgtgatgggttggcggtccttagagccagccatttcagtcctgctccttctctcctccccttcctgaccaataaagattgtgtgcttctgcccagtcagcagggtgggctctcactccatcctgcctctggtatgacagcacaattcccctcattctttataatcattataaaataaaataactaccttttagaatacttatttgatatgaggcactttgcaaacccacagtcctgcatatcccatttgacatatcaggatgctgggcttacaggttaccccaggggtggagttgggctcaatcctaggattgtctgcatctgattctgaagcttgttttcttttcccctatacacaatcattcattcattcattcagtaatttttaaattgagacatactatgtaccagcacctgttctaagcattggattatggtgatgaatgaggcagacagggtccttcccacaaataactaactctattcaagcagtgggagaaaaagcaatgaatgggaaataaatgcacaaatcaagtaatgttggatgggacaactgctgtggtcccattgaaacaagcccagagtgagcccagtgtagggacttcttcattgactggttgggaattgagtgacaatcggttgctgcatgctgatgggtgccaaatacaaccgtaaggaaacactcccctgggagggaggcgggatccaggttaggaaagagccttggattgaggcagagtgtcaggaagtggggaggtacgcagctgaccttggagaaaatccctgagtggtgcagatctcttgaatctctgagtggctcagagtcttcctggaaatgcagaaatccccatgccacttaggggcatcttcattcatctccagccctcctttattaagtcatgtataccatctcctctcttatgcttaatgtcatgccactcttcaatccttgtcccttctttccctctgtgcctgcttgtggtttactcctgctgacaccaaaggctgaggaggatgaaagaacaattccagccctgac

SEQ ID NO: 115 - DNA, 2002 bp, homo sapiens
ggtaattcttaagctggctgggcctaaaactgcaaactggtattgggcatgccagaaggtaaccataaatgggctatttggagatttctaggaagaagaatgacattttgtttcattccattccatttcatttcattccattaatactaaaaatattaactaaagcatcatttctactatatatccagaagagaacatggtcttaggtcttttaataaatgaacttcagttgcaaactttctgctgtgacgttatatttctctttccaccctagaccagcccctaatggggccatgaagtcagatttttggttcatggtgttgtcggggcagcatagcccagaattccacttccttccctgaggacacatttattctggtagatgtgctgttttccatttaaatgtcctttggcaataaaagagctggctccaacagcagaccacggggctggctttgtcggcagacaccacgtgttcatgactggcagctttgtctggaagagggagcttttaaaatgcagttctatgctgactctttggagtcttcccaggaagataactgctattgcattgcatgcttaatttagagcacctatttttccctctccttcaaggtttctgtatatcttctcagttcatgaaattaattatttgggtacaataattgtacaaaggcactttatcagacacttcgtataaattatttctcattctcaaggcaacttggaaaggtcagtctaggggtcagctgctacttttggtgatcaggcatcaccccctccttcctcttagtacgttatgacagtggcaagtgagcattacctgtggaccccaaaggagttcatttccttagagccagccattcctcagttaatctggtctgtcagacactctgtcccaggacactgagccttgagcatgtgaaggtgtgggctctgctgggggcttggcagccagcacctgtctgtgtatcacctggctcctgcagcgagaacctgcaggtgtgatttctgcagcctggccctctgagattccatggctgctgaccattttccactttccaagactgttcacattcccagcaattctgtgaggccctggccttcaaaggtgttcaatacattccttttttttttttttttttttttttgagacagagtctcactctgtcacccagcctggagtgcagtggtgccatttcagctcaccgcaacctccacctctcgggttcaagcaattcttctgcctctgtctcgcaagtagttgggattacaggcacacattgccacttacggcttttttatcattattattattatttatttttagtagagatgcagttttgccatgttggccaggctggccttgaactcctggtctcaagtgattcacccacctcagcctcccaaagtgctgggtttacaggcgtgagccactgtgctgggccccatttgttatttaagggagagtccgtttctgctgtttgtaactaaggacctgtctgatctctaggaattattgaccccagttttcagataaagaagttaagcttgaggttagagcttttgagcaaaaactcctctcctagagaactcaagtatccaggaatactcggtcaaggctgggctggaccaggtctgtaatcctgatattcagaaaagggatgatttctcctctttggtttggttttctcactgaggcctgcacaccagtttatttcctgacttgtgcattcaacatgggcaaatccaggtcaacaaagactggcagcttattcctgagtacagttccaccaggtatggcacacaaagtgatatgagttagaacacagatggatatagatgttttacaaatgtaagtttgcataacacacacacacacattgctatgtgttagaaaaatacaataagctcatctaatttattatttcatgtgtcttattgctcagaaagaggaaaagattttattgaagttgagaaaagaaattgaattaaaataata

SEQ ID NO: 116 - DNA, 2002 bp, homo sapiens
agaaactccgactgtctttcagcacacagaagacactgtactggacccggacattaggcagacacccacgcctgactttcaggagaaaagagaacatgactaacggatattcttagtagatggtttattagaaaagagaacatcttccagcatgtgtcctggggtgatgggtgtgggaagcactcagtccatagtcctggtccctggcttccccaagcccagcaccatgaatgtacagtggaaagcagagggtgcagcgtctcagaaagatgcttccactcacaaggattggagctcacaagtgagctccataacctgcaaaccagagaaacctgagacactgccccttggccattttatcaacggagactttattgtgattatcccggcagggggccgagctctcctctctgcaacaggaaatgctctttagtgaaaatgcagcatttctccaagggtaacaaagctgaacgcctgcttagcttatgaaccctcagttggcctaggtggtgcaaagaccctgctgttactgctttgatcatcagtactgtggactgtaccaggagatccctgggaatgtgctctgggcggaagcagcttttatctttggccctcacccatgctttatatggtgaggttgggaaaatggcacaaggcttctcctgaacctcaaatcaacacccttgccccatttagatcctatctggctgtttcttgctaatattactgcatcactgcaccatctttcctatttcagcaaagtggagtcatgtgtggtttatggggtagatggaccccaaaactgataatatgaatcaagctatggtgtttactccctaggaaatgcacaatttttctggaaacctacagaagcttcaaatgcattcgccatgcaaagctaagtcagcagaacaacccgtttggctttggaggctagttcagttccgcggacagggagaaagatgaggcagactgtggtttttcagttcctggagcttacaggagctccaaagctccctctcttcccaccctggctgcactgttcttaattttagataataccctgccttctcgtattgctgctgagctcctagcatcctcagtttatctgtctgtgaaatgaaaaatctaatgttaaattttttacctatggcatgagagagatggctatggctcttgtgagcctctctgcagcccctcttttccttcaatcaccctctgtctctcctgccttctgcttattctctctctcccctcatccccactttcccagtgggtcctctgttctctttttttttttctttttaaatctctctatgcctccagccgagaagataaagagtgtacatctttctggttaaaaagttttgctttgcagaaacacagccaatttatgattctggccttcccagctagggacagtgttcatttacatttaggaccatgaggagagaggcttagctgtgtgtttctgaggccggagaaaattacagtgatatataacagtgctgcactcatagaggtgctgagccggggttgggctcaggcggccgctaagctcagagtggaaagtttcagaggggaggcagaaaggagaggtctatagctcctccagattctaggtattaatttactaagatattcctaagccagaaaacagagacagaagacaaagagaaagagggaagaagagcaagacagagagttagagagagacaaagagagagagttagagacaaagagagagtggagaggagagagagcaaatattgaaaggaaaaggaaaaagaaagaaacctgacagctcatgaactttttaaaaagttacaaattagatttgaagagatgggcagaggtttaagatttcttcattaggctgggtgtggtggctcatgcctgtaattgcagcactctgggaggctgagggtggcagatcatctgaggtcaggagttcgacaccagacaggccaacatggtgaaaccctgtctctactaaaaatac

SEQ ID NO: 117 - DNA, 2002 bp, homo sapiens
tatatacaacctggaagctctttttccaaccatatcacagacaaagaaattgaggcttgtacaggtgaaggggcctgcctttcctttgctcacaggaatgtgaggatgatacaaaagtgaaggatattggcattcttcaggcagggagataacctggacaggggtggtgcagcaggcatgtgcataaaaggagcaagagaagccttctctgtcgtgagcaagcttgcaggccagatggagaaaaatgaagtaaagtcaccccaaagcctggattctcatctggagtgcctcttgcctcttgcccttcccagaacgctccagcttggcactgggctggaattccactaagaattgagttgatttcgtcatctgaggccctgggcacaatgacaagggtggttttctcggatctgcagtgagcattacaccagagtgtgggaaacagtgcctactcagggaccccactctgggacccagggcaaacttgccatcgtctccagtcagctcattagccgcccaggactctgccagcccatccaggcagtgatgtaattaccaaaatggagatgaatatttaaagggactcttacttaaccgatatacttcctctccaagttccctccttcaccggctctggatgaatttctggagggattgctctgacataggcccagagctacctgtggtttgacctcatcatgaggcctttcttcaccctttcttggtggcttgccttgagggtgttaggagatggtccattgtctgactgtgaacagcagggcagctcttatattctccatcaatggatctctggggacaagacccagatgggtggggggacaggggaaggaaacataaaagccaaagggactggatacctgtaactaattacccctttactgtttctgtcaccagaccttagtgccacaaaggattgggggtcatttgtgacaatgtatgttgtaaaatgtaaaatgcaagtgaccacaaatctgaaagcaggtatagagctttggttaaaataatgcaggctctccactggcattattattgttgttaggagagtctggtgctctgttcaagggcttttctgtgctatggattatctctgtttagcacaaaatatcttgtgtccctggaaaccccttagtcctgagaaaaccagggcagttggtcacccccctgttcaatgcaggcatcagttccactaggtagggggtcttagctgcattttaaagataaggaaataaagacttaatgggttggaataactgggttatgtgcacatagctaaagaatggttacacaaacaacttcaagtcaaatattagacctgcgtattcctaaaatccctatggctgtttgcaataacttgaggccagcctccctctcctcttttctaagccctctttacctttctgtgtcctctgatggctgttgtttatcaaggcaaccatcgtgattcatacctcaaagcacgctttgaattctactcctataggctccaaaacccttattatccaggttcagtattgctctaaactaggtgaggtcctgaacagacccagatttcaagcatattcaggtggatttgtttaacagagtgtggctactggaacatctggagcccaaagtacacaggaggcaggagagagcctactttcctgaagagagggacgggccaactgtccgacaatgaggaggtgggcattctttcctttgtaaaacaaaaagtatctgagacaggggtcagtcaattcagaagcttattttgccaaacttatggaccataacccatgacacagcctcaagaggtcctgagaacatgtgcccgaggtggctgggttacatcttggttttacatgtttgagggagactgaagacatcagtcaatacatgtgaggcatacattggttgggtccagaaaggcgggacaacttcagaggtggggagtggcttttaggtcatgggtggattcaaagattttctggttggcaattgg

SEQ ID NO: 118 - DNA, 1002 bp, homo sapiens
aaaagtagcatcgagaatcaatttgcatctcagaattgggatccctgccctaatctctctactttatgcggccgtgtcctgcttttcatgactctagaaagcagaggagaaagtggatgtaagatataaattagtctgtcttgtagggctttctcttggtcccattctgggaccagccagtgtccatacctgtggcctttggtatccaatttaaggcagttcttctctttccatgatcacacagtaaaggagcccccgtatacagtgctccaggactgagtccagtttttagtgtagcgtgcaacaagagcagaaaaggcagagttgggaaggacatgtcaacgggcagcaatgaggtggtataaagaccctgggcatttggaggcaacagagggagaaaggtctgcttcaaggaccaacttggtctcttcctatctctgccctggcagcaccagcagctgcacattggcccttcttaccacttccatggcaaaaccaaggttttctctacctcgcctagccggcccctgcagacttgctgacacagctgagtgcggagtgcatctagaccccaacatgaggcgcccttctctcaaaacaaatgagccttcgaaactccagcaaacagtgctaatgaattgccctcggcttcttaggcatcattttctcgtaattataatgggaagaagacatggagtcccactgagaacgtggagctagcctgcccctagagcaaggcaaaatccctctctgaggaccacactcaagcagaactgatttttctaagacttagagaagaaacaaaatctgatttaattcttaggaaattgctttttttaacccacctgtgtaagcctgtatttaaatgctaatatatttggcctgccgggatgccacatttattttcttccttagcagcaacaaaaatcatttatttatgagaattctagctcctacctgctctcctgagttcctcatcttcatttccatctaccagctgga

SEQ ID NO: 119 - DNA, 316 bp, homo sapiens
  misc_feature 284: n = A,T,C or G
gaggggtttttaagattgtgtgttctgaatggcctgtctctgactggaacccaactccgtccccagacccacttccatctttttctgtgagggggacacactctttcaacttttccaaaatggcatctaccatggcttttctgattaaaagcaaacgaaacacacccttcctataatcaaaaatttagaaaagcagcaaaaataaaaaggggataaggaagaaaacagaaattaaccaccatcccagccgctaaaattttgatgagttctcatgtgtttccttncagctgattgttgtttggcatacatttattaa

SEQ ID NO: 120 - DNA, 413 bp, homo sapiens
  misc_feature 177: n = A,T,C or G
cacttccatctttttctgtgagggggacacactctttcaacttttccaaaatggcatctaccatggcttttctgattaaaagcaaacgaaacacacccttcctataatcaaaaatttagaaaagcagcaaaaataaaaaggggataaggaagaaaacagaaattaaccaccatcccnccgctaaaattttgatgagttctcatgtgtttccttagcagctgattgttgtttggcatacatttattaatattggaattaaaaatatatatggcactttatatcctagaaaatagtaatactgtaaatgtgttctagaaatgggagctgctgttgctcttattagagaattcaaacaaagaagggaggctcgctggggacagcttctgggggaggatgggtaccgctttgagaca

SEQ ID NO: 121 - DNA, 414 bp, homo sapiens
aggtatgagtcagttgagtggggacaggtaatagagagctagaactggctggccttatggcctccaaggcattggggagccactgtacattcttgagcaggcaatgacttcacaaaaggatttctcaaaggttagtcctgcaacagaagacagcgtggattggactggaagagtgggagggcaggtggagaaggcattggtctgcaagtggggagcagccctgggggcccagccagtcccctgtgccctgacaagtggtatggcatggatggatggctctacttctgggccgccaggatggacaggtactggttgctcttcaccatggcgataatgaggaggccaccggtcagcaggaaggtgggccagaagagggagaagaggagggcctggggcccgtagaggcgctggaat

SEQ ID NO: 122 - DNA, 346 bp, homo sapiens
ccccatccctccagttcagtacctgctggttctggtcccgagtgtcctccgtgtggtacagcacagcccacctgccggcagctgacacgttgacccacaggcatgggtactggggcaccttcttgcccttcagctctctcctggtccctgatgttggtctcaatcaggtggcacttggattcctgggtccacacgctgaggagaccacacacatgcacacatacacatctcagaactgggtgacacacagaacacccatttgaacccattatcccctgggagcctctagagggatccaggactgggctcctcatcttgtcttcagcatccagcaataaaggcacat

SEQ ID NO: 123 - DNA, 484 bp, homo sapiens
  misc_feature 148: n = A,T,C or G
ttccctgcacttgaaccctagaacctaagaatgagcatcgtcttgaccctgctgccttgaatgagggtcaaggagaggggtgagtagaaggccagggttccttacagatgccagacccttaggagagggttggggggtgggcaggccnggagagctcagtaccttttctggtagaggggcagcacagtcgtgaccaggatgtagtaggtgatgacggcacacaccaccatggttacacccagagcaaagggctcgtgtctctccccgcttctgggccatcaccagcttcttcaccatattcactgggggcagtgatcatttctaggtccacagaagcaaacagaagtgagatcagcccagttcacaggtgatccacagaaagagaggacaggtgagaggggaaggtactcaactattaatatcactcttgtttatatttggagctttgcaacttccagaagtcttgctttttggaccccatgta

SEQ ID NO: 124 - DNA, 182 bp, homo sapiens
agaggaagggagtcctcctgcctgcctccctccctgccccgtggcaggctgctttccccatgtctccctccagcccggtcttcagagaaatcacttcccaagtgctttcaggcccggtactcacagtcttcccggcgtcctgtgggtcttgagcagcagacagtttctttctgcctggaccc

SEQ ID NO: 125 - DNA, 146 bp, homo sapiens
agcccggtcttcagagaaatcacttcccaagtgctttcaggcccggtactcacagtcttcccgggcgtcctgtgggtcttgagcagcagacagtttctttctgcctggacccccgcccccaccccaaaagaggccacagagcttca

SEQ ID NO: 126 - DNA, 146 bp, homo sapiens
agcccggtcttcagagaaatcacttcccaagtgctttcaggcccggtactcacagtcttcccggcgtcctgtgggtcttgagcagcagacaggtttctttctgcctggacccccgcccccaccccaaaagaggccacagagcttca

SEQ ID NO: 127 - DNA, 1002 bp, homo sapiens
cttatctccacccttcacttgacccaagaatcaaagaacctgaaactgagacttggaggcttgaagtcactggtgcaaccctaggggccagaactagattcgaagctggcccttccagatggcacagcttggtctgtctctgatgaccctggggctgctctgagacattaaaaatcacctcgatcatacagtaagctgccacctgaggctctggaggtcaccctgagtttccccagcccccagggaggtgggtgcagcctggccttccctgctgagcgagctcaccaccttcctccctcctgcctccagcaggcgcgaaatgaaggcagccactcaggcctccctgacacactctcaggcggtgagtgcccttctccacccctttcctaattgaatcttattaacaggagactacagtgtctgtttaatgggcaccatagcaccagagggtctaagaccagcttcagaccttgcaggcagattgacagagggatgtaggactctggaattcaatctcagaagagcaattttccaaggatgatcctctgtccactcagaagcaggaaaagtcctcctggggctaatccagaaatgccaggcccccctcctgcttccctgggggagagatacacagtgcaacaggctgccatttatgagtataaccgaagggctccttgctcgtgatactctgaataagttattaagggctacatattatttggaaatcataaacaaactttagcattcttcccaagggaaggtgggaacaaacagggaaggggggccgtggggtcttctgctccccctaaatgagccacaaccaaaaggcattgacaagccctgtcctcgagggtttgtgggtgaaaacccaggtcctttgctggctgcggggttgtgtgtgacagatggctacaggtggagggcaagaaaataacaatgctgcaacaataaatattgacggtttgcattagtacggggtgtcagagatcacaaaatatcttc

SEQ ID NO: 128 - DNA, 2002 bp, homo sapiens
tacttttcagcctgaggtctcctcctcaccactaacacccttccctccaatcaaactgatccattgtacctacaaaaagcccgtcccacctcctagcctttgttcacactgggttctctgctggatcaccatccctccacatttccaggtgtccctcaagactactcagcagcagctatccatacaagttcctcaaccctggctttcttgccctcaagtaaccagttcatcctccccagtcatatagccctctatttacatttcttttctggaagctatcatttttcacgtgccatttgagtgagtgtcctcgctaagacgatattttctttgagggcagtaacctttcttatatgtctctgtatcccatgaacttagcaaaaaacaagggacagaacaggtgcaaagtctacgtggttagtgaatttaacagatcttcctaacgtgtaaacgtcgttgtccaggtgaatggaagaagtgagctgagatagaggggacagacagagtcagtgtccagtgctgacctctgaaatggaaaaacatggccagtccttaggaggctgcagaggccaagaccccagtgaggtttgggggttccacagcagaggaggagctgtggaccacagcaggaccccgatgccatcagcaggggaggaagtaatcagagaggtggaggaaggaagccaagggaagtcaagtaaacaccaaatattccctcccggtccaatgctgtgacctgcataagccaccactcccccagtctagactctacccatggaagaaggaagaagatagaactctggatttgaatataattctaaaataaccaaatttatctgaaaatgactaggctgagttttctgcttcaaccagaaatggagcttggagtcagaaattatgtgaaattatagaagagaaagtcaccatcttccatctctgagtcgtatgatcattttagacataaaattgtgcacttacgatgtaccaagtgcttaatatactgtgatctcatttcaccagggaaactgtataattcattgctttaactgacaaaattctgcaactgaagaaggtgctgttaataattgcattgggacgcaggcctgagcaggccatgatttgtggctgtcctacatctgaccctcacagtatccatgggagaaggcagcatgtttatgccccctgacagctggggaaaccaacacttaaagtgattaagtcacaagtccaaaataaatgacagagctgcagttcaagcccaggtggtcatttaccaaaggccatgctcttttcactttgcatgggactgtgaccgctggctctacccagcttcccagtgcgacccttccccgcccactgtttctcttctctggccaacggaaacacaatgagaccacatatgtaacattacattttttcatagccacattgaaaagaaaaaggaaccaggtaaaatccattttaatatgatattttatttaacccaatacagttgaggcttgaacaacacaggtttgaactgtgtgggtccgcttacacatggcttttgttcagtctctgccacccctgagacagcagggccagcccctcctcttccgcctcctcctcagcccactctacatgaaaacaaagaggatgatgatctttttgatgatccactttcacttaataaatagcaaatatatgttctcttctttatgatttctcgtaataacattttcttttctctagcctcatttactgtaagaatacagcatattcccagctactcaggaagctgaggcaggagaatcacttgaacctgggaggccgagtttgcagtgagccaaaatcgcaccattgcactccagcctgggcaacaagagcgaaactccaactcaaaaaaaaaaaaaataaaaagaatacagcgtataatgcatgtaacatataaaatatgtgttaatcaactgtctatgttatgggtaagtcttccagtcaacagcaggctattaggagttaagtt

SEQ ID NO: 129 - DNA, 1121 bp, homo sapiens
cgctcagcagccattaaaaggatatcatccagtcacttagtttctcaatttaactttaaaggaaagttgccttattagagaagtggcctctatttcaatgtaatggtctttgtcacatcttccaatgtgctggcttagtgctgaaggatggggaaaggcagttttcacatattgcagccaccataccaccaaagaaaacaggtgcacttccaggcatcatttagcggggtaccacgattcctggttccagtttcctttttagaaaatctgaaagtaactttggggcatatcttttaaggagtactccaacacgactagtggacagaccctaaattaattgccaatcagctctgccttctggtatttacacctttatgtaataacctccacttgaaggtagatgagatctgtgacttgcttctaaccagtggaatatggcggaggtggtgggacgttactcctgtgattacattacatcatgtggctcctttatgatggaagattcatgctagagattctccttgctgacttgacaaagtatgtaaccatgatgaagacttccacgtggcaaggagctgtgggaagcccaggtgctgagactggcatccagcaaacacccagcaagaaacagacgtccttggttctacacatacaggaaatgaattctgccaacatcctgagtaaggctggaactagattctccccaagttgagcctgacaagtaaaatacagaccagccaacaccttgattgcagtcttgtgagacctggggaaaaggacacagctgaaccgtgtccattcttctgacccacagaaactgtcacatcataaaggtatgttagttgttacacagtttagaaaactattacagctgctcaagaaggttagctagctccagatttcaatccattcacaggaaagcaagctttattcctagaagaataattcatgctttgcaaaaagaggaaaacgtcctgcagttttagaaggtcttttctttctcaacacacccaaatttctttaaaatcctcaagaagtgcatttgttttcatggttgactcgaagaagtgagtataattaactcacaaaaggtgggaggaagggacaaattaaattttggt

SEQ ID NO: 130 - DNA, 1002 bp, homo sapiens
cactcaaagggctggggacccttgtccctcccatgtgcatccatctctcctatctctgagtccccagtgaactgctgcctccctagagaaacagtgctagaagtcagtggcaagagcagcaggaggacttggagctacatgcagagtgtgagctccggagtcagaccagctgagttcaaggccagctccaccatctattcactgtgacttcaggaaggttgcttaacctctctgtgccttagctgcctcatctataaaacaggaaacaatgagagtctttccttatggggctattgaaatgattaagtgagatcaggcatgtgatggcacacagtaagaactccataaacagaggtcaccactgctaatgcaattattctatcacctcaggagactaaagcaggggaggaaacaccattgactcctggacatttacccaaggagattatggatccatgttttgcacacactttagaaagacaaggaattctaaccacagcagtctgtctccactgcccccgtcatttcagtctcacccgtccaccctcaacctcaccactgtggcccggaaatgcggttgcccagggccactctcaccccacctcagccctgctctgctcaagtctcacttccactccttccagctcccatccctttctacccagctccaccctgatttctccaccatgacctttaccctcctagtctgatctagacccctgatcttgccgagtatctaggactttggtgcctttgaccctcagcagcagaggtagagagggatctcggtgaagtctgggatgttatagtgacttgtttatctaagtgccctgagactgtgagttccctaatgcagggagcatcaacctctgcagagagccccagagccctgctcaggtgtgatgaacaggaggcactcacttgatgccctcacaaagttgtgagtgaatgaatgaatgagtgaatgaatgattgaatgaagattagtgattatgttaatga

SEQ ID NO: 131 - DNA, 895 bp, homo sapiens
ggtggggggggagaggggaggggaggagaggggaggggagtgggggagaaggggagaaaagcgcagctggcttcctcactctcctttccttcctcaccatccttaccctggcccagggcaggaggaggattggcagagtagaggcagggtcttctgtcttagctgggcctgttggtgactttctgttggccaacatgggctgactggaatgttctccagcatggcacatggtcatccagatgcaggctcttccctggggcactatagcagagagggctctcttccagtctattgcagatggatgccctcgtgagctgagttttgatgaacatcccatgtccccagccaccccattcagagcctctttctactctggtcctctggtcccagcagcagccctctgggtactgaggggagggcatctcacccaagccccttaaacctgctcaccttcttcagagcccacgtggccgcaggaaagtcacaaacccttgtgctcccacagggcacacgtgtgcacacgtgtgcagctaccttctctctagttggtacctgaggctgcctcctggattttccagtctctgtgttcccagacaacccccaagccccaagaatacaagagctctgtcaccaagcatcgggcctgtggctgcactacacgtctgcagctcaggacccctggctgcggcgtaagctaccagcatccccttctcatgggcaccctcatctccggctccccatcgctgggctgtgacctgcgggggcgcccctctatggaagggaaggagaaaaattcacagtgctatctactcctctgaatgcactcccaccaatttccttggaaatttctagctttcactgacatatctgggatggggcggtggtcacaaaatca

SEQ ID NO: 132 - DNA, 735 bp, homo sapiens
ctggctgggggaccatgggtcagggctgccaccccctggctctgtgccttcacctgtgtaacgaatggggcactcacagcccctctcaagtggtcctggggatgaagtgagaaggtgacatatacaagtgagttatacacgttcctgttctgtcactcaccagtgctcactgggtgggtcactgaactcccctcagcgtttccttctccatctgtaaaccaccagtgcaaacctttcccagatagtgctgacccgaagcaggaaccagtgcccctctgccctcagtaagtctgccagcagagggaagcccatagagggtcttgggaaatgaagccaacagagtcaagagggtcagatgatgagggacttcaagtgccaccttcatcccattctttctgcaaatattcaccacacacctacgtgacctcaggctctgtgtcaggtcctggggatgtaatggtgtccatgaagaaacaaggtccctgccctcatagagtggcctgacatatgcccgaggcagtcagcagccgagtgcgggagactcttgagcagagattgagtgtgttgatatctgtaggcatcagcctggctttgctgagtgagctatatcagagtggaggaagccagaggcaaagtccagactccactgatcctggattgaggggagaaggggcttggcggaagagcagcctgagcacctgcatctcactccaactggtgctgatttgttcccat

SEQ ID NO: 133 - DNA, 899 bp, homo sapiens
tccacaggtttgattataaatgtgtgtattgaattggaatttctgttgaaattctgatcccttctagacaaagaaggtaaaaattgaaacatgtcaatggatatctaaatatcattactcactggctttatttgcaaatggctttccattgacaacagttacattttgttcaaagcaacaaatgattggcgctgacaatccacaggaacatggtgcagtcattaatgaatgtgctcattattcctccctgccgggaggcatcgactcccgttctccagcctgttttaagcagacagacctacatctgcacctgtcagcttggaaccctagtaggggagggggatgctgatgtgatggagaatgaagaatgggccctgcaggctgacattttgggagagtaggttctgaaatttatcccaaaggacatggaatcctggaagcagggttcaagatcctcccaaaattgatctcccaggatgcttggaatgattgttcctgagggttttgtaaaatgccaggggaaaaccaggaagcttctctccagttgtcttgcctccttcctctccagtctccatggagctgactttgagaattaactcctgagggacagagaccctgggatggagagccagccctgctggattccacaaggtgctgcttaaagcacaacacctcttcccaatgacaggttctgaaagaaggccttgtagctagatgcacagagggttttgttttgtttttttttttttaacctttcagcatctgtctaaaattgctctgggctgggtacagtggctcccacctgtaatcccaacactttgagagctgaggcaggaggatcgcttgagcccaggcgttctagaccagcctgggcaatatagtgagatctctatgtctag

SEQ ID NO: 134 - DNA, 445 bp, homo sapiens
ggatctgtgcctgaagctgagctgctgcaatgaaactgacatttctgccttgcagcctggccatgggcttagctggactaaaatgctgctgcagtggtgagggcacgtgagagtccctaatgtacatggccttgctccttgtcctgacacatcttttagggctgctgctttctctagtgctggaatctagataattcctttcccagccgtttgtttcttcaatcttggaaaatatctggatgaatgtaacactgtcacacacagaacagaattatgacttacgtcacattctatgtcgtgattttgtggacttttaataattgcattacatttgtgaccattaatttccaccatcgccctgctcctgagaatctgtaagggacatttgacactcctctccccacccacctcaacatttgtgctgacctgaaggtcacattaaaaa

SEQ ID NO: 135 - DNA, 1002 bp, homo sapiens
gcaactttccctggcctgcaggaactcagggactcaggggactaataacaacagtgtatgagcttccgggcacactgcttcccagtggcagcccctgtacttagggctttgtatgtattaattcatttactccaattcccacaataaccctatagggtagggttttattattgattacctttttacagaagaggagagtaaggcaaagagagatagagtagttttcccaaggtcaaagagcacataaatgataaaggatggatttgaatgtaggcagaatgaccctcaatacagactgttcctacagtccacgtcctcagccactagaccatacggccactgggatgatagacagaccactgcagccatggataaggcaaaaacagggctggctgtgttgatctgtgtctctcagagctccattcttcctcaagggggcaccttgcaaaaaaaaacaaaaaaatggggcagggtagggaactgaaggcaggagctcttcactagagcatagccacatcctccaggcagacaagaggacgcaggaggcaccattctgtgagagtatcacagtctgacccaaagacacagcttcacactgtctgatggcttgatggttaatgtcactctgccttttccccttctcaggactttgtaaccgctctgtcgattttattgagaggaactgtccacgagaaactaaggtggacatttaatttgtatgacatcaacaaggacggatacataaacaaagaggtaagtgagctggggccaggggtgtgagagggctccagtgaaggtaactaacccaacagaaaacagccccaggcatgaggatagcactgtctgaatgaggcaggctctgctttggggctaacagagctggtccctggcaaaataaagaaggcctccctcattgccctaccctgccctgttcccaagcgcccagaaaggattaaacagattcattctcactgggtcacctagattcagtagatattacac

SEQ ID NO: 136 - DNA, 1002 bp, homo sapiens
tagggctttgtatgtattaattcatttactccaattcccacaataaccctatagggtagggttttattattgattacctttttacagaagaggagagtaaggcaaagagagatagagtagttttcccaaggtcaaagagcacataaatgataaaggatggatttgaatgtaggcagaatgaccctcaatacagactgttcctacagtccacgtcctcagccactagaccatacggccactgggatgatagacagaccactgcagccatggataaggcaaaaacagggctggctgtgttgatctgtgtctctcagagctccattcttcctcaagggggcaccttgcaaaaaaaaacaaaaaaatggggcagggtagggaactgaaggcaggagctcttcacagagcatagccacatcctccaggcagacaagaggacgcaggaggcaccattctgtgagagtatcacagtctgacccaaagacacagcttcacactgtctgattggcttgatggttaatgtcactctgccttttccccttctcaggactttgtaaccgctctgtcgattttattgagaggaactgtccacgagaaactaaggtggacatttaatttgtatgacatcaacaaggacggatacataaacaaagaggtaagtgagctggggccaggggtgtgagagggctccagtgaaggtaactaacccaacagaaaacagccccaggcatgaggatagcactgtctgaatgaggcaggctctgctttggggctaacagagctggtccctggcaaaataaagaaggcctccctcattgccctaccctgccctgttcccaagcgcccagaaaggattaaacagattcattctcactgggtcacctagattcagtagatattacacagtggataaaaatgacttgtttcagtgtgaagagttactcttccctagggaacctgcatttgggaaggttaggagccacaagtcaaagctaaaagttgaaa

SEQ ID NO: 137 - DNA, 1002 bp, homo sapiens
ttgaaagagagcgctttggggggttttcttactgtatgtctctattgcatgttctgtattttacatttttctattatttcttctctgaggtatagtattgaatgtagaaaaatcctcaaatgttcggtattaagcaatacacttctaattcatggttcagagaagaaaatatctcgaataaaaataaaataaaaatatgacttatcaaaatttgtaggatctaaagcagtattccaggaatgcaaggttggtttaacattcaataattggtcagtgtaattaatcacattaatagaataaaaagagaaaaaatataatcatttcagtggatgtaattgttcagagcttcttaaaagaagcaactcactattttactagatgatttgtttcttctgaattcctctttaaggctacaggtggtgcttcttactttgaactgatcactttctaggtccccacccttacttcttgtttttcatacccttgtagagttttctccactataggaaacccatgcttgacatttgctcaccagagttacagagctctcagggaggagactcagagttctaaccctcttgccctccttttttcccaggacgacaacatcatgaggtctctccagctgtttcaaaatgtcatgtaactggtgacactcagccattcagctctcagagacattgtactaaacaaccaccttaacaccctgatctgcccttgttctgattttacacaccaactcttgggacagaaacaccttttacactttggaagaattctctgctgaagactttctatggaacccagcatcatgtggctcagtctctgattgccaactcttcctctttcttcttcttgagagagacaagatgaaatttgagtttgttttggaagcatgctcatctcctcacactgctgccctatggaaggtccctctgcttaagcttaaacagtagtgcacaaaatatgctgcttacgtgcccccagcccactgcctccaag

SEQ ID NO: 138 - DNA, 583 bp, homo sapiens
ttttttttccccaatcatgctgtattcttagcgtaattttaaaatacttaaaacaagatcatgagaaaataaatgcccagattctagcaccaaaattcagaagggggggctatgagaatgaggggcggggagaagccttcctgagagtttctaagaggcatggaggcagtggggatagtgattagctctgggggaagaagaggctactggctggaaaagggcatgaggtagggttggtaatcacctacttgttttatctgagtgctggtcacacagatgtgttcactttaggaaaatgtattgagattacacttgtgatttctgcatttttacatacgcacattaactcagtcatatgctgataaatgtttaacaatgggtttgctggagaaaaaagggtcccccggatttgtaatgtctgcccatttccgtggtgtaaatactcccttcacaactgatttcaagcttcccatgcactgtaactgaagacagagttgggaagatacgtgcagtagcacaacattaaatcatatttccaccatatacacacaataggtgtaaataacacccagagcatagaaaa

SEQ ID NO: 139 - DNA, 621 bp, homo sapiens
ggttggcagcttttaataacttagaaatggctgggggtgggggggaggaagtactgaatcatttactcattcagcaaataaccagggaatacctactctacactggtcactgatggagatactagacttgggcaaaagccgcgtcatctggttgtgttcaagctgaacattcccttgacccagtcactgatggagatatagacaggcaaaagccacgtcatctggctgtgttcaagctgaacagtcccttgacccagggcccatgacagggcagagggcatattattatccccattttacaaaggaaagagctgtcagacacagtgtcacacaggaaggtagacgataatgtcaatatccctcatcttagtataaagttgtccttaaaaactctccattatttattaatttattgactcacttattcatgttttctgcacagtgatacttatcctgcacgagactctcacaccagtgctttgggtgtaagaacaccccaaggattgtgttcccttttctcgaagagtctgtggtctaaggggattcaatggggtccactttccaaaccaagacagcaaaggaacactaggagagaagtattctgtgcagagattcagttat

SEQ ID NO: 140 - DNA, 538 bp, homo sapiens
ggattaacaggcatgcaccaccgcacctggctaatttttgtatttttagtagagatggtgtttcaccatgttggccagagatggtcatgatctcttgaccttgggttctacccacctcagcctcccaaagtgctgagattacaggtgtgagccgctgcacccgggcaactggtttccttttactgccactttcactaaccgtggtatttctccatgggcagcattcttggcatttgggtgtgtaggactgtccctcacatagtgacctcttactcatgaattgccagtgtcacattcagattcttatggcaaccagaagctcccctgctcccagcatttctggactcagcctgggctggggaggttagctcagaccaaatatctcctttctgccagttgctctgctaggcccaggtcatgctgagcagagcaagatgtagctgaaaaccaaataagtcacgtgttccagcttgctggggttttgtgaagaaagcagccacccctccagtcatatagtttgcaggttgggatttgcatt

SEQ ID NO: 141 - DNA, 656 bp, homo sapiens
tggctattgtcttaagctactattaccttcttgcttgtcaagttgcgcatttacttttcaaggcttgctacgtgcctggaatttctagattttcctttatttccatgcttggggagaggagtgcctggcaggctcctaagaggggtctgtgctccatctcgccccctatcttgaactatcggttgggtgctctagaatctgtatggggtggaagtgttcattcattttctgtacaaaagcaatcaatgcttattgtggaaaacccaaataagagagttgctctaaacaacaccctccccagtcccaataccttgtccagaagaaaccactgtttggtgagtatattagtctaatgtctgcagaccagatcggatgaccaagttttccataaatggatggccatccacttcccttcaagggcgagggtagtttgttctgatccatctccctgtttcacagctcagggagggaggaagacccaggaaggagagctgccacagttactagtggcccagctgggatttaaagtccgccgtgactgaagcttggctccacatgccagtctgcaaggccctgagtgccctcagcagtaattccaagcaaagcagggaagcagcgggccaggtgctgaactgaactgctgctcagggctcctg

SEQ ID NO: 142 - DNA, 579 bp, homo sapiens
ctgcatatgttcccccaggtatttgcccccgaagcacagtcatctcactgccttgcatagtggaatgctaatcagcagaagacccttctatgggaggcagcttggaaacctggaggaagccctggctgaggaggctagtggtcagggagcctatcctggccaggtcacttttccccactggggcctcggtttcttctttgtaaagggagaaacttacattaggcatttcctcaggttccatttggttctcaaattctaatatttttatggttgatgctctcaccagagctgctgctatgatctcagagacgtgaggctcagatctaattagaagcaaccggaagagagcagttgggatttttcaactcaggaatcagtctccctgctgggttcaaattcaggctctgccacttacagctgtatgactaagccttgttttcctcaactataaaacagaggatagtagtagttaccatcttaaaatagctgttgtgttgtgtggatttcaaggatcatgcaagtcaagcatttagcacagtctctgctacataagtggtcagcaaatttgaggtactattc

SEQ ID NO: 143 - DNA, 985 bp, homo sapiens
agacccttctatgggaggcagcttggaaacctggaggaagccctggctgaggaggctagtggtcagggagcctatcctggccaggtcacttttccccactggggcctcggtttcttctttgtaaagggagaaacttacattaggcatttcctcaggttccatttggttctcaaattctaatatttttatggttgatgctctcaccagagctgctgctatgatctcagagacgtgaggctcagatctaattagaagcaaccggaagagagcagttgggatttttcaactcaggaatcagtctccctgctgggttcaaattcaggctctgccacttactagctgtatgactaagccttgttttcctcaactataaaacagagatagtagtagttaccatcttaaaatagctgttgtgttgtgtggatttcaaggatcatgcaagtcaagcatttagcacagtctctgctacataagtggtcagcaaatttgtaggtactattcaatttatggctctattgtttggggcttccaaatgtccagagtaaggccattttcgaagtaggcagtacatctgagagccttaacagctcatttctggaaaccttatccagccctatccagataactaggaccaaaaaccccagcacacagatgctcgtcccttgcttcaaccctcactgacctctactctgtggcttgtcctgaaaacatcaaagcctgctcaattaaaatcctgaatgccttgataatacaatttagaaacatacatagtttttaaatagggcaaaaactctgcatgattagtgctgcaagaagatatccagcccaacctgggtgttcagggagcgctctctaaaggcaacagaaatctaaagtaatttaagagccatgccactgaataaaaatattcaggttcatttcctgtccttctctctgtttgggatctttgtgtgtctttaattaaaagtaggagagccctgctttt

SEQ ID NO: 144 - DNA, 597 bp, homo sapiens
actacttctaaagcctcttagaccctggtaatcttcctcctaacaccatcgggtgactgcaaagcactgcaggccagacttcagttctgctgtgtaatttgcaagctgggtgaccttccttatctatagaatgggctctctctgcatggctggcatgaggaataaacaaaatggttgtgtccagtgcctggggcatagcacagctcaaaaaacttagttcatcctcctgagggatcaagaagatacttggaaacaaatgtccaagggcgtaatcttgaaggggcttgtgccaggcatatatggagagaagggttttgtgggatgtcagacttaatagtgccctttactccccacccccgtctctctgttcatagacaggaaatctgtggcctattctgggacctcaaagtgccacagggttaaagataccaagtcagaaatctaaggttctaaatggactttagaccatttttcatttgggaaggaagaattctttaaggggttgtgctggcgctgtctctgtatgcatgtgcagaatgtgcttccagatggggtaatggtctgagtttgaggacagaagtccactccactgcattc

SEQ ID NO: 145 - DNA, 988 bp, homo sapiens
gggtgtggcctttggacagcaccttagcaggaatgtggtggagagcagccccattcactccagaggagagcctcaaactcttcaggcagatctagcctaggtagaatcttggcctggcccctccgggatgacaggtgccattgcccaagaatggggaaaaggctgaagtgctccagccaaagaccccaatttatcttcaggacaattttcactggaaaccttgcctcaccactgcccactttttcagaagtaattagaatgctaatctataagaaagatgactattaaaaataaattaataatagataatacattttggcttacaattttgaataatatagccatcccatcttaaagtaaaaattcatatatttttaataagcctgagacatgttttccaatgaaccacagatggttcatttttattatcctataaagagacattatgggcaagtgttttttaaaatggtaaaacagaaccttagagcagctctcttttgagagatctctaagcactttctaagcatcaggacccccttctgtcatcacagagactgaaatgaggagatggtctctgtcaccccctcactcaccagtgagccccagaccttcatccctgatcagatggaagcagtgtggcatgattacagttcatatttcaactctgccactcaatgactaatagccaagcactaataatgcagaaaatgtaaatttaaaaaataatcttcctgagattggttatgaaatgcactcaacacagcaccatccacagagaggttctttttaattgctcttttctttcctctcgacacccagaatcacaaagcatgcctgaaagcgtcacacatatatgtctgtgaccataacatggcattgcacatgcaaaggaaataaataggtgttacccatgtgacaaaggtccatgagctctgtccgcaaaaagctgttgagtttaaagaacaaataattctgaaaaatcttccag

SEQ ID NO: 146 - DNA, 835 bp, homo sapiens
ctgccattctgatcactgcaagacccccacccccaatactcccaattgtaccaccccaccccactcaccagtgtctcagaaatgcctcctccagaaggaaggcatcctgtctaacccactgcttctagccaagctgtctttcttcagaaggtagaaaaagtattgttagtcattgtttaatctttattgagtatataccgccacaccaattgcactgccattcattatctcatttaaatctgacaagagccttgtaaagtagggattattcccaccatttcccagatgttgaaactgaaattgataaacacgacatgttgccatggctacatgaagatctccaagccggaggatctccaccctcacctgcctagcttcccagacctctctgcagaaaagggactgacccccaagacagccctggcctctgggctccaccccttccacatccatcccagggccgctgaggactgaagagttctccacgtttgccctttaaagtgacttaaaaataatctttatgaatttcttcatatacaaaatttgtacttactcattgcagcaaatttagaaaatacacataagcaaaaaagaacgtaacagccatccataaccctaactctcagagatcaccactattaaaatgtttattatctaagagagagatgatatagacaaagatgagacagattgacacagacaagatgggtacatgatagatattttctgtgttataacccttgctttttcttgcactttctagaatttttctgagaactaatctgaaatctgcacagggtccccacgtttggatcctctatcccattgccttcca

SEQ ID NO: 147 - DNA, 904 bp, homo sapiens
agctgagccccagggctcccccatgagtggggaggaaactcatgagtgccttctatatgccagcgctctatctgcaggggttcttttgatagcagcagactgagagatgatgttactgtcccctttttcctgttgttggcaactgagactcagaggatggaagtgacttgctcaggtccaccacctcttcagctgtggagctgcgacaggagcctttgtttgacttcaaagctcaccatcactcctctctcactgatgctcaagtgggctatcacctcgcctttcctgagccttccttcgctatcctaaaacagcgcctcccgaaatcaccactaaagaacttattcatgtaaccaaacaccagcggttcccctaaaaacctatggaaataaaaattaaaaataaaaacagtgcctcccatgacccatgtctctccagtcccataactctgctctatttccattcacagctccatccccacctttatgtcttttgttcactgctttatccccagtgcctagaagagtgcttggcacctagtagacactcagtaagtatttgtcgaatgagttaataaggttgtgaaaagaacgttagattactggaaggattcatctgagtttaattctgctatgctgggaatccagtgtgcggccttggatgaaggccagttccctccctgggccccagtagccacatctgtacatttagagggcaggagaaaagccacacgctctgtgacttatacaacttgttgcccagagtggaggctgctttgatgctcagaaaaaagaaacaaacatggaaatgctaaatgggtggcagagagcttgagggaggaaggagatggggagggtactcttgaaactgtttggtgtcttccctcctgccccctcagtaccaa

SEQ ID NO: 148 - DNA, 862 bp, homo sapiens
gcctgacagatttttactgaagggtgcacattggaataaaaaatgtgttacctatctggttgagtcttcagcttcagaaaggtaatagagcaaaggcagataaatccaaacagggactgagctgttttcatgcaggctgccttggtagctctccaaagccttcaaaaatgatgagatttttttttaaatcctttttatccaggttgttctcaagggattccacccctgcataggagagctcaccattcctgggatcttcagcttctatgcctttgcatatgctcttcccttgttccctcattcttcaacactcaactgaattatcacctcccttgaagccttctctgacatcccttctagtcccatgccacccaggaggcactaagagcttcctcccctcagctcccagttcttaaacatgtcaacactgttttgaaatgatttgccaatgaaaaattctagaccagcaaccaacaacatccttcccaaaggtgtgttatatatggtacatgctctatgtgctaaacaccaaattcattgataacagctaagaaccaggaaacaaaccatcgttaattatggcatctcttgaaaaatctaaagatctggactcactgggcttaaatgactgcatgataacaactggttgagtaacaactgtttccctttcatggagcagttactctccagttctcagttcctaccactctctatagttgtacactcatcatctgtcctcatctgaattacctgccaatgactactggcatttgagtttctaatccatggtctatgtgtatgcctcctcaccagtgtgagaactcatgtaaacaggtattatgtcttttcatctctctcctaa

SEQ ID NO: 149 - DNA, 1105 bp, homo sapiens
ataatggtcacgttggagcaattgccatttcaaatcattaggaacactcaggtcactttggcatggagctattttgtaaaagacgtagaagccatttataaactttggtttgctttttaaaaatttatttcattctgaggcttatccgtgtaaaattaccaaaatgattgtggttagactctacattgtcacagtatttaaatgtgcacaatattccacttagaaataatgtcagtactaaaagtagtagagggctttgatagcaatattaatacatcgttaagcccttctcattaaacagtgtaatagtcttgttgaagtttgttaggcattttaaccactactaattaaaaatagacctactgactagtctgttttactgtgctttattgtgtcttggatgttcattcagatacttttgctgttgagaaatcaaatcgtctcttatggttttaattacaaaatacatattagagggatacagttcttagggctgtgatttttaatttgtgtaacctttttttattttggaaaggaaatttcagattttttctagtaatttttcatttgtgagtgttgttttctagatacagaaaatgtacctagatagatgatcacattttaggatattttgcttacgtgttattttatatttatatactataataccattgtatagttcagaacaagaaaatatcttgataaatcatctgctactgtgaggcagttaaaaaaatttgaggctcactgaaaatgtgtgacttgcccactgtctcatattgctagtattggagagaaaactagaatctaggcctttattttcctgatgtaatgattttagctaattattatttattttcttaaatcattgcattaattcgatttttcacaagtagagcctatatcagtgtttgcaataattaaattttaagtatatttctataattgtaaataaaatcctgacatttgttacaggatggggttttctttcatcatatttttataataaaaattaagcagttataaaaataaatagcctagtttttcaattggtataagctggctttattttatactgctaataaaggcacattatgttcaagca

SEQ ID NO: 150 - DNA, 595 bp, homo sapiens
  misc_feature 550: n = A,T,C or G
cttatatattcattaattaataatttatattcacacaatgattgtagaaatgtgagtgtttcttagattaccaaacatctgtgaaatcgtgaaggagtattgaaatttagtaatttggtttggatctttgaagatattctgtagaattgttttccaaaagttacaactggtttacaatttttttcttaattgccattaacaagttttgaccctgagatgagaaattattcacaaatttcaattaaatactggaatgcttcatattttctgtactttaggacagggatccccaacccccaggccacaggttggtactggtttgtgacctgttaggacctggactacatggcaggaggtgagcggtgcgtgagaaagcattactgcctgagctccacctcctgtcagcgacagcattagattctcataggaggacggaccttattgggaacacacacaagagatctaggttgcggactcctcatgagactctaatgcctatgatctgaggtgggacagttttatcctgaagctcccccactatccgtccagngaaaaatttggtcccttgtgccaaaaacactggggacctctgctt

SEQ ID NO: 151 - DNA, 2002 bp, homo sapiens
agggctgggcgtcccccgcccccaccgtgcagccctcgcccccgccccgcccctccgtagttgcccgcccgccgccccctccgccgccccctccgccgctccgactctcgccccgagcgctggcagcaggcagcaggcagcaggcgggcgcgctgtggctccgcgccgcgcggtccgggctctgttcattcatgattggtactcggccctccgagacccagcccgagcgcagggaggggagccgagtgtgcggcaggaggggcgggcggacggcggctcccgcaccgcacgcggcgctggctcggcagcctcggccgggcggccgctctggccccgtgtccagtgccaggcaggcttcagggcaccgtcctcggccctgggcgagggaaccgccgggccgggtcctcgcgcggggaagcggttccgaaggctcgcggggagcggctagccctgagtccctgcatgtgcggggctgaagaaggaagccagaagcctcctagcctcgcctccacgcttgctgaataccaagctgcaggcgagctgccgggcgcttttctctcctccaattcagagtagacaaaccacggggatttctttccagggtaggggaggggccgggcccggggtcccaactcgcactcaagtcttcgctgccatgggggccgtcatgggcaccttctcatctctgcaaaccaaacaaaggcgaccctcgaaaggtaagccaccttcttccttttgttcccctgtctgggcttgggggtgctaggcgccgaggtgggctgtgccacctgcctcccttagtccggactctcctctccacgaggagcccggacaggtgcttgtatccaaaggagagagaaatcggcgggagggctggtgtgaacacccagaggagggagccggagtggacgtctgccccagcggcaactggacccctctggggcaccaggtgtcgggactctcctcctggggaaatctctgagagccgaaggaagcggcaatgttcacaggtgggggtgaccggattctctggtggaagtgtggtgaagctcttcccattcccatgacagctggcgtttgagcactcagtgagggtgctgccacactcccacactcctcctaggcggctatgccaggtgcagacctgcgagtcccttcatcaggaagagtgctctgtctgcacccccaaaacctctgcaagccaaaaggaatcagctgctgccaggggtaaaactcccaggcctcatgtcctggtggctccgggagtcaggaggagcaaccgtgaagggctggctgcgagctgagcttacatcaaggattaaaaagcataatatcgtggagtctcttctgcctggacgctgttccttcaccacctgtccccagccgaggcatggctgatctcaccatccgtgggagagtcctcaaatgggtccaggtgaagttggaaccagtgtgttgggccctggaggacaatgcaggtctccttaccagcagttcaaaagttagtggttggaataaagagactggaagcagttaggaaacgggaaatgatgggttttgttttgtttaatgttcaaatgtcactacgagtggtaagattttaagcagcttgacacttaaacattcaaattctaccatcagagcccccatcctggatacaggtgggagttaagctcctaccctacaggcctgatagtgagtagaagtgtaatggggtaagggaccccaagtgaacaataagtctcctcttagaacttggttggtctcaccctgtttagaaccacagagatctccataagtaagctgtccttgaaaccccctggaagaaggggtcccagcttctggcccagctcccaggggcatcaggctggctgagccccgaggaaagagatctctgggtgcagatcttaggtgctgaagctgggttggcatttacatcctagaacataggaagaggctttggcccatttgtccagctgagttacatgtcctgctggcaagg

SEQ ID NO: 152 - DNA, 700 bp, homo sapiens
tgggggtgctaggcgccgaggtgggctgtgccacctgcctcccttagtccggactctcctctccacgaggagcccggacaggtgcttgtatccaaaggagagagaaatcggcgggagggctggtgtgaacacccagaggagggagccggagtggacgtctgccccagcggcaactggacccctctggggcaccaggtgtcgggactctcctcctggggaaatctctgagagccgaaggaagcggcatgttcacaggtgggggtgaccggattctctggtggaagtgtggtgaagctcttcccattcccatgacagctggcgtttgagcactcagtgacgggtgctgccacactcccacactcctcctaggcggctatgccaggtgcagacctgcgagtcccttcatcaggaagagtgctctgtctgcacccccaaaacctctgcaagccaaaaggaatcagctgctgccaggggtaaaactcccaggcctcatgtcctggtggctccgggagtcaggaggagcaaccgtgaagggctggctgcgagctgagcttacatcaaggattaaaaagcataatatcgtggagtctcttctgcctggacgctgttccttcaccacctgtccccagccgaggcatggctgatctcaccatccgtgggagagtcctcaaatgggtccaggtgaagttggaaccagtgt

SEQ ID NO: 153 - DNA, 2002 bp, homo sapiens
tcaaacttttcatttgctcaaagcctacagcaaactcagtccacacacttggctatacaagaaaggttgctttctttgttgttctataactgactttaatttcaacttcaagtccccattcttgccaaggggtagaaatggaatcttggtcaacttaggttcccctccctactctctggggttgcatttccaggccaggcagtttctgctggtgcttttgttccttggtcctcagtcttctttctgtgttgacatccattgacatgtcctcgactcccctcatctcagatcacaggcccatgctgactccaggagtattcttgtattctcttcatctgaacctcaacactttttgagaccacgcatgcatgtgctctctctttctctctctctctaacacttctggaacactcttggacatgaggagatattggtctttctaggatggggtcaactggccctgcctcagatccattggcctgtacatatcttgtagccattgtggtgccatggatcacaggtcacgatgctgtgtggctgcctctgctcttagacctgccccccatgccaccagagggagtgtctgcctccccctgccctggacactcagctggaggggagggtcacagtccctcacagtcccttctccagtgacaagcaacaaactcccagtcttcctttctttctgatcctctcctcctcttcctccttctcctcttcctcctctcccagtccaaggaagttttatgcaaaggccagaggagggaataatgaggtggaggtctctctgaccaagcatgtagccttccggatctgttgtgctttccaggagtccttcaaagctctaagcttttggaattctgcaagctcaggaaattgaaaaccttttctctcacaactgcaggtctttgtctgcagttgtaaaagtctgtttagaaactcaggagacaagcagcatcttctttgttccctgctttctggaggcagtcagcgtggaacaaccctgcctgcagtctgactcagggaaagggtcactgagtgtgtgtgtgtgtgttgaggggtggataataagcaaggagaacactcagacagagagctcacagaggggcaccccagcacctccctcacctctatattccccgcctgggcatagtggagggagggttaatgccagccaagtttaacaggcatttctgattcgcggcattgttgttgcgctatcctgcaatcctacgctgcgggtactgtttttatcctgatccttcagctctggaaactaatatagagagctgagtaacttgcttgaggccatgatgccaggatccacggtgcccccaggctgaagagccttaaccactgggctgtaccacctcacaggagggcaggtggcacagtgcctggaacttgggagggtccagcacgtggaactatgctctgtcatttacttactgtgtgtcactggatcagtcactcaacaccgctaagcctcattttccacctcttcaaaagggatctaataaacctgttagcagaaggctgctgtgaacactaaatgaggtggcttaggtgagagctctggtctgaagatgctcacactttgaatctcaagacttgtgtgaaccaatatcagatttctcctattagattgcaattctcagggagtcacattccgtctccaaatgcccatctcctgatccacaaaatgagcacaacatctctgataaacggtaactagatggttccagtgggcagcgggagtgggagggcggttgactgggccagaacctcaaatgtattcctgtgtagtttctcatgcattcattcagtttggcaccagaaggtgcccagactcactttgcagccagtctgtccccatagaggtgataaaggaaaaacatatgcacatttaaacttttaaaagtttatttgaacattcagcgattcacaaacggtatagcacagacagcaagcaactagcactcctctaggaggggccaaacag

SEQ ID NO: 154 - DNA, 2002 bp, homo sapiens
acagaaatccttaagagcatcagccgtgacacagaaatctaatacaataaaacaaagtgcttataaaccccagagttgtttaaaacccagaaattgccaattgacatatgggactatatcttcttagcccctagtaaactgagtggcttcaaacaagtccctatcacctcccagggcctcagtttcttcacctgtgaaataagaggatcaaaaaaagataatgttctctctgttctcttccaaccgaggcaggcatctcaagtatttcttagtcagttctactctaggctacacagtatctgtatctggcagctgtatgaactactgttgaaaatcctcttcccaatcccagtttcaacatcactcctcaaggcagcatccaccttcactctagactgaattaattcctctgtcttaccacctaaactcctctagaaaacttgatagaggtaaagataaatgcattttttcaaaaattctacttttctagtcccaaggcattgtgtatatcattcttatgtaagttatcacaataaacccataattagttacttccatttatgtcaaatcgcctacaaagcagaaacatgtattattcatttttggcttcctccccagtatctagcatacgaactgtttgcaaacatgcccagttcttcaaactttgtaacttcatgccttttctatctactacttgggatgggcccaccctccctttgtcctctaagcacactcctattcatccttcaaagtccagcacaaaaatcccctcctctgttaaacttcaactgctccaggctgagtcttatgtttgggtccttcatacgtacccctcttctattgtttggggtattgtgtgctgtgggatctgtttactctcagttctcccctctaggctgggttccttgaaaaacaccctctggacatttcacctctacatcctctgcattcttggccaggctctgagagggcattggtaaatgttaactgcctggcaatgagtgatgctgttaacctgatgtgtcaggggtctgaataaagctgcctcaaggtaggcagatgcccacaaccaagcaagaactcaaagctgcaggctcctcagcctgaaccttagacagcgtcttggtcaccatttcaacaccttgaccacatttctcactctcccaaatttcctcctgcttattcctcatccacatacataaggctgtgtctcccaggggaaattcaactacttggtaattatcctgcttcttaagtttggggctaggggattcatagatgatgttcagtattatgctgtgcaatgtagatgcttcctaaaccttctcaggagctaccactgagtggcacctggggacctctcaggaagagccagttttctgggcagtgtggggcaggacagagctcattaaaccagcctaccacctgtcttccagctcctcctctcagcctctgggcttccagcagaaagcacacgagagcattcttgttggttttcttatgacttgagccagcgagacgtacatgcccagcacctgttacctgggctggctcttggctgagagcatacatgcattgggtcaggtttcagatctgctggaggaacacagccagaatgtcttgacaggcagccctggcaaagccccagaaaatataagatctgagtcttatgatggactctgtgaccttgagcctctcacctcgtgaccttgggcatctcatgttctctccacaggtctcggttctggactccttcatgggagctgtcatgcccctgtcacacagcagtgttgtgcccccggggatcagggaccaggatggtcctttcttggtggtgaagggggcattttgcatattccagagattcaagtttccagacctatctagaaagaaacatttgagtttacaggttggcgcttctcagcctctgtctctcttcctctctgttcatctccctctgtcccctctatgtatgtttgtgtctctttctgtctcctctgcc

SEQ ID NO: 155 - DNA, 2002 bp, homo sapiens
ctcactgcctgcagtttattcaggcattggatgagacagcttcttcctgctccatgtggagtcagctgggtacttgaactgggacatggatgatctactttcaagatggcttattctcagggctgccaaatggataccggctatcagttgaaagctataagcaggggcactctgcataagcatggctcatctctacaaaagctcctccccagtctccttgtttgggcctcacagtgtatggtaacctcagggcagtcagaatgtgacaactaaagacttcaggagtaagtattccaggaagcaagatataagctatgtggccttctaagacctagcctcagaggtcacatagtgtaacctctatcacaccctattggtagatattgtaacagaagcccacccagtttcacagatggggacatagactccatttcttaataggtaactggccagagttgtaaaagagcatgtgggatggaagatattgttgcaagcatctttagcaaatacaactggacatacccaatgcaagcacaggattgatcctccactctgcccccataccccatgatttattagccactcggacaagtgacttcaactctccaagcctctgtctcctccactaaagtggggacaaatgagtattacaaatgagaccattaaataagataatacattttaaaaattaacctggtacctgtcacaaagtacatgcctaacaaatgtttgcttctgtctcacttcctcaatttcatctcagtcaacctggactgactcaaaatggcattcttcttggctgccccctttgaagtatttctgctgagaaaatagtttctgtgtatttgtaaatttacaggttgaacatagatcattattcaagcattgctggtcgattcgtcttttcaaaggcgggagctgctggctgtgggaagggacccagcaggggtctcttgcaaccctgctctatgggtgggggaaatctggacctccctctggtaggggttgattgaagtgaagggtcaccatatgtctttcccaagagggtgactgacttcctgctttggtcccagtttccctgagattttcctgaaagcccttccggctagcccagttgggagtgttagtacatcagatcccatgctttggtgaaaaatgtaaacacagacctgatttttcattttaaatgaagccaagcatattgctcccagcagatgccgagtgactcaatctgtcctctcggttctgaagggaactgaagaacaacatggtaaaataaagcaaacagcacatttattggttgataaaatgctgttttagtctaccctggcattatatggtgattgctatgtggcgaacatctgttattaaatccagacttctgttgcctggatacattgagtcaaaagctggagcggatgagaaatccatttatgcgtctgttgcgtgtgaatgtcagagctcatatgatgcctttgtcttcattctaactgaatcttttaatatggaccgtctcacttgttaattctgactcaggggcaataatgttttcatttgattaaaaaaggttaaagaaacaaagaaacagtgttttctcaggtgctctaagtaattctgttaatgaattttcggagacagcgtgtgaatttgaaaagagtaggactttttaaagagttcatactatgaacccaataattcagatcctagggccttatcctaaggacataatagaaatgagcacatttataagaacaaagatgttcaatgaagtgttacttacaacagcaaaaaaacttgaaagtcacctaaatgtttgtaagtcaagagcttcattgatattgactgcaaagtccatgttattccatgtgacgaattttttaatcaatcacctcttgatggattttaaattttttacaattttttgctatcctaaaaaaaatgtgtcaatgaacaactttgaactaccctgactaccactttaggatagattgctagacgtgga

SEQ ID NO: 156 - DNA, 2002 bp, homo sapiens
atcaccccaaatagttatgatgaaggtgatctatgtacgacacttagagaatcagtgatggaaaattcaccaagaacagccacaggcaggccagaagaatggccctgcccctctacttttaggattaagcagaagctggccctagatctcaccagttaccagtgatcttgggcatttttagcatcatgtgcattgcttcactgtgataccatcttgctggcacagccatggaaagccatgagttaatgcatctccccatgtaacaaacctcccctaggactctggtccacacctatctctgctagattctctggcattgcaagaaattcttcagactgccccaagagattcgttccaatctaggggctccttatccccagctcagagctggatttggctcttgcttggaggcgggaagccctgctgggccagggcttagaggggctcacaagaaatcaaagcaagcattctccgcctctctcctacagccctgcatgcatcttctctgatcccttgcctgagtggggggtggcattccaaaagctcattactggcttacatactttgccttaaatcagctcttaaatgccctgggatgaacagccctaaataggaaagaaaaaaaaaaaacaagtttcttgcaagttcacagatatgcttggtgctttctgtcaggctagggtgtagccttctctgttctaaatttgattttctgagtctttaaggaaaaatggctactggtcccctggacgctgattgcttcagcatctgaatctgctccatcacttctacctccacccactggtccacgtccagtgggtagaggtaaaggggatggagatatcatttatcttcaaaggataaaactgctctgagagatctttgctttcttagaaacactgctggaaagttgtttctttagactacattaacagaagtaccatctctaggaagacaaggtggtaataactaacatcaaatgagcagttcctatgtacccctgtacatgtcttagccaacttcatccttgtaacaaacctggaaggcaggcactgttatcactcttattcccaggtgaaccagttgaggttccaagaagtcttttgtgcaaggtcatgcagagttgaggcccccaagtcggtagacttcaggagccagaccctcaaccccctcactgcctcccgcctcatgctgcactgagcagaccatacccggatggtcatgttcaggttggctatcaatgcagaccacgctgggcatattcaggggacggatactcagaactatataacataaggaatagaggaaggactggaggatgtattaacatgaagaaaaggtagactcatggcaggagatgagcagggtaaagaggtgcaagacataaaaagccaatttcatatacatgaagatttatcaagagccagaaggccctctatgggtccaagagttacaaggcctaatgaggtgaattaatgccagcatataaggaaaagcttttgaatactcagaagtgtccaaaaaggggtcaggctgccttggaaagtagtaagctctccatcagaggcttggcaacttcttattagggatggtatgagtatctcaagtacagatacagatgacccaaataaccactgaggcacttctgaccccaagtataagagattctattgtaacgcacaggagtccatctcaagcagcacactgagccatctccttgataaacctaaaggtaggtattattcctcccagatgctgtcttcttagcctgggatgcaaaagccataggatcacttcacgtccaacccccatcaggtgatctgtcatgaatcacaagttattggagccagatggaactacagagctaaaagatacatgaagacaccgaggcctgcagacagggactaactttccaaggtcacagagctaacaagtgtcagagtcaggctagacccaggactcacaagttgagctcacaattagttccacttcctacaccacc

SEQ ID NO: 157 - DNA, 925 bp, homo sapiens
cctgagcctctgcctccttctgagaaagacccttgtgattacatcaggttcacctggataattcaggataatctcttcatctcaaaatccttaagttgatcacatctgcaaaatctctcttaccatgtaaggtaacatattcacagcttctggggattaggacatgcatccctagggaaccatgattcaacctagcatgggggaacccactacaggcaggtgttgtccttgccatcgccagctcagtgcttggcacagtagaggccatggatattcattcagagagagcatgcactgaggcaagcctgacctcaagatcaagacaggaaattggctttcatgggttaaggacctgttactttgctcatcaatgtatccttaatcatcagaggtcagatctgctggagagtgcaatctttcaggtttccaaaagtaagactggatgccttagaacttaaagtcagggaggtacccaagaaagcaatcatagactgagtccccatgcagtgcactttctcggatggacaatttctctgttctgacagtcactgttgactccatttctcagatgagggaccgaggcacagagaggtgcagtcagtcacctgaggccacacagtcaggaagtggaaatccatggaaactcatcatcagctgcctcgcatcagggccagtgctctttatctccaccccacacattataaagccactcagctttacactcaagggaacttcctatttccctactggattatatgtataatttgtagtattgcaagatttgaacagaagcgagcagcagcttgtagttgtgtgtgtcactcactcctgcctgtggggatgccacgtgattgtttaaagggttggaatcaggagaaaggcaggctcagagcaggaccaagagagagcccacccctcgcctccc

SEQ ID NO: 158 - DNA, 1383 bp, homo sapiens
attataagtatataccacactttgtttatccattcacttgtcgatggaaatttgggttgcatccacctttttttgctattgtgcataatgctgctatacacatggctgtgcaaatatctaatattagtccctgctttcagttcttttggatatgtatccagaagcagaattcttggatcatatggtaatcctatttttaattcttttaggaactgccatattgttttccacagcagctgcagcattttacattcctaccagcagtgcacaagagttccaatttctccatatcctcaccaacacttgttattttctgttgctgctgtttgtttttttattaatagtcatcctaatgggtgtgaagttgtttctcattgtggtttgctttgcaggttttgatttgtagattttcctgatgattagtgatgggtgcatcttttcatgttcttactgaccttttatatatctttcttggagaaatgtctgttaactctactcatacttttgtaaatagtattcccaatccttctaactccccaatgaggtggatattagtatgttcgtgttacagtaaagccaactaaaccttagaaagactaggttatattatccaaggtcacacagctagaaaatgacacagcttgtattgaaacatcagtttttctctttccaaacctaacgcacatttcatgaaacctacattattgcaccataacatcatgttgatttacttatctgctctcctgcctgtcccatctactacataaattgagtgtggtttgaaatcagagactacttctcatctttggcacagtggcagccatggatcagaatctcttacatgctggataagtggatgcaagctcaaggccacacctaaagtccccaggtgacttgatcacttgagttagctgctggaaacctgggcttcctcttctgcaaaatggggagagaaaataaattctcagtggattgtttagaagatttgagcaaagacctctgcaaagtgctaagcatgtggctagcatgtggcaggtgctgcctaaatagtagaaattaacactgccatgcttataagctccggacaaacacaagaagcccgaaacataatctgtgccttctgcttgcattcctcctagttggggatgtaaaatagcccagctacaatcaaagaagaaaatcaaagtcagcacagactatggatatgcttctatatgtgtagattatttccagactcattcggaagaatctggacatactggttgcctcagaggtcaagaaaattggctcatttacttctgtaacttaatttcgactctctatgcttttacatagttggaatttgccatgcacatatactacatttaaaagagcgtgtacgcg

SEQ ID NO: 159 - DNA, 910 bp, homo sapiens
cacaattatgctgtaggtgagttttaccttgggaaaccaaggcacagaatttaagtaacatattgaagctcatgcagctgctaacagggaaggccagggtctgaacccagctgatccggctccagcatccgagctctgaaccactggtctatcctgcctctgttaggacttggtccaatgtcatcatcctagaaggaacatttaggcccgcacggtgggtggctggttcaatccagtttaaaggccaggagcaggacagtgacttgcagctgcagcaatcctatgactcaaaccaaagcagctgtgacaaataaagggactgactctcattctcccgtgctagggaaggatgagctatcaggccttgttgcaggctgagtcagtcatcccacaaaccacctaagtgaaacctcttcactgagccttatttcctgagcgctctccctttatctgtgcttgcaaagaggctgtctccctccatgccagccaacccacccacccccgcacacacataccacctctggctggaactgacgaccatgggttttagaaatgagataaatctgggagatgaatgtattcatgagcccataaaggggtcatgaatcactggccccaattactgccttcaatcctgacaggatgaattccctcaagcagattctccttgtcagacaacacgggaggcagtgtcatggctgatctagagccacagataacatcattattccataccaggctggtttcggtttcccaagccacctccacttgatttacagctcacttctgatgctggagagagagataaatatatatatatatatatatatatatatatatatatatatatatatgaaagaaagaaagaaaagagagagagagaaagacacaaaggggaagctttcatgcc

SEQ ID NO: 160 - DNA, 898 bp, homo sapiens
atcccaataggacacatgttgtattaaaaagccatgcgagacggaagaaggaaattgaatgaaatttgagggcaggtaggagcagagacaataaataattcagcagtgaaggaagcagaaaaaagattgcactcatttcgcccttcaacaattatactaaacacctgctctgggccacagaagggccagatcccattcctgtgctcaggaagcccacaggccggcagggagaggctggttggaatgtgtgctttgcactgtaacggaggcatcgagcatggtaagggactggcggtggctgctgcctgcggacgtcgagcaggggcctttgaagaggcaggacctgtctggagtcttacctgggccttggccctggcaatggggaatggagcaggcagcaggggacagatgctgccagaagaccgagatggtgccggaggactgggctgagtctgggtcaaatgacaccgccccaggctctctgccctctggggtgaggcaggaggctgcctctgtgtgtgattcagagaccctagaatcccagtggccatcaccccacagcacatgccaacctttctgtgataactttctcttgtggaactgtgaaagtgtaagaccagctcctgtatagtgcatggccatcctttgctttggggacagtaagtcagtcaacacatacttataaatggggtcctgggccgtggcactgatctggtcctcccaccttgcctcacactgcccttcccactcaccacttccctcctctgcatcttagccgcaagggactttcagaccaagcagacctggaatcaaatcccaccgctgggcctcaatgccagtggagacaggaacagctgatccctggagccctcaggaggaagaggacgggatgcctggc

SEQ ID NO: 161 - DNA, 2002 bp, homo sapiens
cccactcaccacttccctcctctgcatcttagccgcaagggactttcagaccaagcagacctggaatcaaatcccaccgctgggcctcaatgccagtggagacaggaacagctgatccctggagccctcaggaggaagaggacgggatgcctggcttggctgctggtctggggcaggtgcccagttacagcagttggaaaaatcctcagtgttggaaggaaatttggaagtgagcatctacctgcctgccgtgcagtttgtgacttttaagatggttgacagaacattcccaaaggaccacagcggtgaccactgttctcgtttccctttggtggctcactcactcagtgctggacacagtggtcctgacaagacagtgctgtggcttccatgaacctaggacagggatagactcaaggactaagaacaaaccaggaagaagcatcaccacaggctccttgccagtcacctcatctcaccctcctggccctggcggatgggtctccatatttacaggggccagatgaaaaaaccagaggagccaggaaaaggagcttccccttcccaagggcgcaaggtgaggtgccagtcatgagatgcaagccctgagctttctgattccactgcatgtggtcccaaggttcggcgccgcatcacacagttagtgagcacactctcctcccctggccccgagtgagccagctggatggcagatcagaaagagaagtcccgggtgcccccaacatggctagctccttccaggaccaggggctaggccccagctaaggctggtgcacacagcagggcagggggcgaaggagtgggatcccacccagggatcccacccaccccaaacctgctttcggacatctttccaatgcataatgtgcagatgaggccctttgataaggaccaaatccctttccgttgcttggcaacctggctcacaagtcatagcagggaagtaatttacaggaattcaaagtgtcgctggaggttcgtgctgagctgaattgctgcaaagaggaacctcaatggtccaaatcacacctctggcggggaggaggggctgaaggaaaagcttccacttccgtcacttgagagtacagagccctgagctcagactcagcgatcgttttccattaacggatttactggttccatgttgagctcctgctgtgtggcaggccctgtgctgggagccagggacacagtgacaaacgagacagatgccaaccccggatgcacagagctcaaagagacagaggagtaaacagggctacacatgtgacaagataggctgtgcacaggggtctgagcaggacccttggggcaggaggaggcagtggagggatgggagggtagggacgcagtggtgaccagctagccagatagagaacagagggtgtcccagcacagggccacacaagcaaaggcagaggtggggagagaagagcctgccacactctcagatcaccatgtggttgggccagggccccagctgaggctgaggacacatggagcccagatccggcagggccttgaatgccaagtcagaaagcatctgaaatttagtctacagatgatgtgggttattgacagccaggacagggaatgacatttgtgtttcaggaaaaccactgtcttcactgttagggggtagattcagggagaaacaggaggtggaggggaagaaactgtgagtaaaggagtctctggggtacaggtgaagtttctgtgaaactggagaagaaaactgttgaggcaagagttgacaaaacttgaagtaggatggagaggaagggacaagttcccctggcatggtgacggcccggtggtgggaaccagggaagaggaggggctttgcaggtgtctgacttgcccaacaggtggcgccatttaccaagatgggaagggccggggagaagggagggttccattctagggaaatctcaggtcctcgctattaggattctttcggttgccagtgactgaaacccag

SEQ ID NO: 162 - DNA, 1002 bp, homo sapiens
actgtctagatctggggaccctcccaagctctcagagctttggaaggaaggtccctgcagggaaactgtgtgtgtttcttcaacagtgtatcctcagtgcctagcacatggtaagtgttccataaacagctgttgaagagacggatggataactgaatgaatggatgcttccatgggcaatgacacactaatctgaaaagccctgtatcaatgaaagaatcacttaatagtttaacttttccctcatccttcagaacacagatggcatgccatcttcccttcaaatctcttcccagtgccccacacagaagaggcacacttggacactggtgtctgatggacccaagttcacagcctgtctctggtcatcaggtatcatgaccttgggcaagaagcttaactctctgagcctcagtttccccttctgtcccccagggaaaatgagtcctgcccctcctaagggaggtatgagatgtaagaccccgaaggacacaaaggttctgccaggagccttcaggtaggaggcaggtaaggaggtctgctagattggaatgagtttctggaaggccccaaggagctcaaaatcagacctggggtgaaggtgtcttgaccaaaatgagacccatcaaagaagcctggatgaaggtgcccacagcatccatcagtgccaaaaacagaaacactttagcccaggatacaaggaacattttaaagcaacagagataagagatagttagaactcaggcctcctggctcttgctgttcttggcccataattagttgttatgggaccttaataaacttcttgccttcttggtacctttgccaaacaatctgatgaggagaatattgagtcatggtgccagggaaaattagcatattctgcaaattcctggcactgttaacactggattctgtccacctttagaaatcctcagatcactatgtcagcatcccccaatcacagctctccaacttcaaggagggttgaggggtctgaag

SEQ ID NO: 163 - DNA, 1002 bp, homo sapiens
aagaatatcagttccacttcccttgtccctagagagccttgtagtggatgttgatgtgtcttccaacacatgcaccaacctttccctgtcctgtagcagttgagatggaatcatcccactcccagctccaggaataggctctgatgggcttgaacccagcagcttaattccattggttctctaggccttcatcattagtacaggaaaggcacttgacctaaattagttcgataagatttaagctcagaaatctggtttgttggatggagaaagagatgctttctttctctctggaaggagtttattgcaaaagtaagggctggggctgctacagccattgtgctaccatgagggaactagccatgataacaaaacttgcctggggaggggctacgcatcacagaaaatgatgccaaagtcctgctcaaactgtgcctgatgcctgcctgatctatggacttcttagttccatgtaatggattctctctatttttaaagccagtatcaggttgaatttttggagaaataaaacaaaaagcatcttgactaatttaaaaaatcttctttgggtattcaaccctcctaaactcacccccaaatccactgggagcatgtcaagatttttgtgagccgatttaggagatgcaaattcatttgccttaattggatctccaggaaatgacttctgccccctcttaaatcatttaaagctcaaagaggcatgagggccctccccaaggatgcaggtatcctcttgactgacagcctgtatgctctgcttccaggatccttccatctcctccctttactgagggagtctgctatgtgttagaggtgtccatcactggtcacactgggaagctgtggcagggaagctggagaaaaagcaagataggccccagaaagaacaccaactccagactcagggagactcaggccagaatcctagctcaacttcttccaagctcccaaagtcacactcttttctctgagcctcgattt

SEQ ID NO: 164 - DNA, 957 bp, homo sapiens
atcccactcccagctccaggaataggctctgatgggcttgaacccagcagcttaattccattggttctctaggccttcatcattagtacaggaaaggcacttgacctaaattagttcgataagatttaagctcagaaatctggtttgttggatggagaaagagatgctttctttctctctggaaggagtttattgcaaaagtaagggctggggctgctacagccattgtgctaccatgagggaactagccatgataacaaaacttgcctggggaggggctacgcatcacagaaaatgatgccaaagtcctgctcaaactgtgcctgatgcctgcctgatctatggacttcttagttccatgtaatggattctctctatttttaaagccgtatcaggttgaatttttggagaaataaaacaaaaagcatcttgactaatttaaaaaatcttctttgggtattcaaccctcctaaactcacccccaaatccactgggagcatgtcaagattttctgtgagccgatttaggagatgcaaattcatttgccttaattggatctccaggaaatgacttctgccccctcttaaatcatttaaagctcaaagaggcatgagggccctccccaaggatgcaggtatcctcttgactgacagcctgtatgctctgcttccaggatccttccatctcctccctttactgagggagtctgctatgtgttagaggtgtccatcactggtcacactgggaagctgtggcagggaagctggagaaaaagcaagataggccccagaaagaacaccaactccagactcagggagactcaggccagaatcctagctcaacttcttccaagctcccaaagtcacactcttttctctgagcctcgattttcccatctgcaaaatggggatactaagggtcacctagctgggctgccctggagattccaagacatta

SEQ ID NO: 165 - DNA, 1002 bp, homo sapiens
gggtcctaacaggccacagacccatccgtggcccaggggattggcgacccctgtctttttttttttcttttttttgagatggagtttcgctcttgttgcccaggctggagtgcaatggcacgatctcgactcttcaacctccgcctcctgggttcaagccattctcctccctcagcctcccaagtagctgggattacaggcacccgccaccatacctggctaatttttgtatttttagtagagatggggtttctccatgttggtcaggctggtcttgaactcccgacctcaagtgatccgcccacctcagcctcccaaagtgctgggattacaggcgtgagccaccacgacctgcccggggacccctgtcttaaaccaccccagcctgtgatactttgttatggtgaccctaagaggcaaatacaccctcctttccccaacctctcccctcagacgaaaccgatgcgaaaagtgcttcatgaagtttcaggtaaagaagtcgtgggacgaaaagggatagtgaggatggcgggaggggctgaactccaaatgggcttatcaaggctctgcaaaatggcgtgacggcgctgcccccttctggtggcctgaagactaacgcacatgatgtcaagtgcggggcccaagtactcaggaaaaggttctcatttggacactgggaggtcttacattgggggccctgagcctccagcccttccaaatctattctcagcaggagctcagccacacctgtgtcccagaactgaggccaggcccagccttcactccacgcccagccagccccaaggaaccgactccctgaggctctatgctccctgcctccagtggccccgtgtctgggaaatagtggccctggcctgatgccctgacctgggcaatccatcccctggtcctctcagctcccgggcccaggttttctgggctactttaaccagggcaaactcattcctcgagtacaaaataaaagattcgaacagcataatc

SEQ ID NO: 166 - DNA, 2002 bp, homo sapiens
ggttagtgggatgcagcgcgaggctaaggagtgtctggggccaccagaagccagggaagcctaggaagggttttcctagagcctttggagggagcacagccctgctgacaccctgacttcagactcccagcctccagagctgggaagggataagtagctgttgctttaaaccagtggtccccaacccttttggcaccagaaaccggttttggttcagtggaagacaatttttccacggacagggtgtgtggggtgggagatggtttcaggatgaaactgttccgcctctgatcatcaggcattagcattagttagattctcataaggagtgagcaacctagatccttcgcatgcgcagttcgcaatagggttcatgctcctatgagaacctaatgcggcggctgatctgacaggagcggagctcaggcggtaatgcttgctcgccagctcacctgctgtgcagccggggtcctaacaggccacagacccatccgtggcccaggggattggcgacccctgtctttttttttttcttttttttgagatggagtttcgctcttgttgcccaggctggagtgcaatggcacgatctcgactcttcaacctccgcctcctgggttcaagccattctcctccctcagcctcccaagtagctgggattacaggcacccgccaccatacctggctaatttttgtatttttagtagagatggggtttctccatgttggtcaggctggtcttgaactcccgacctcaagtgatccgcccacctcagcctcccaaagtgctgggattacaggcgtgagccaccacgacctgcccggggacccctgtcttaaaccaccccagcctgtgatactttgttatggtgaccctaagaggcaaatacaccctcctttccccaacctctcccctcagacgaaaccgatgcgaaaagtgcttcatgaagtttcaggtaaagaagtctgggacgaaaagggatagtgaggatggcgggagagggctgaactccaaatgggcttatcaaggctctgcaaaatggcgtgacggcgctgcccccttctggtggcctgaagactaacgcacatgatgtcaagtgcggggcccaagtactcaggaaaaggttctcatttggacactgggaggtcttacattgggggccctgagcctccagcccttccaaatctattctcagcaggagctcagccacacctgtgtcccagaactgaggccaggcccagccttcactccacgcccagccagccccaaggaaccgactccctgaggctctatgctccctgcctccagtggccccgtgtctgggaaatagtggccctggcctgatgccctgacctgggcaatccatcccctggtcctctcagctcccgggcccaggttttctgggctactttaaccagggcaaactcattcctcgagtacaaaataaaagattcgaacagcataatcaaataggtcatacccataaatcaacacatttgagcacctattttgttgttctttcactaatccaaaccatatttattgagcatctactatgtgccattctccagtagccattctaggtgcaggggatacagcagagaccttgaaaaaaggaacagtctctgatcttgctgagcttagagtcaagtggaggtgaggaggaaggaaatgaattaacaactaagtgaagcagaaggtaaccaattgattgactgacgaaggggtacaaacaacaaacaccttcctttctccaaactctatctttaactgtattctctcgttttccttcctctccattttacaatcattttacaacatctctggctattctcctatatttctgatcacttcggttctcatcacaataataatttcagttttcaagcattggaaagtcccatccaattaaaatgtcaatctcacacgcagtttaaacgtttcgcctgcccgtgagctcagacctgtcttggtgcctcagttcttgtgtggaggggagga

SEQ ID NO: 167 - DNA, 1002 bp, homo sapiens
tggtggcctgaagactaacgcacatgatgtcaagtgcggggcccaagtactcaggaaaaggttctcatttggacactgggaggtcttacattgggggccctgagcctccagcccttccaaatctattctcagcaggagctcagccacacctgtgtcccagaactgaggccaggcccagccttcactccacgcccagccagccccaaggaaccgactccctgaggctctatgctccctgcctccagtggccccgtgtctgggaaatagtggccctggcctgatgccctgacctgggcaatccatcccctggtcctctcagctcccgggcccaggttttctgggctactttaaccagggcaaactcattcctcgagtacaaaataaaagattcgaacagcataatcaaataggtcatacccataaatcaacacatttgagcacctattttgttgttctttcactaatccaaaccatatttattgagcatctactatgtgccagttctccagtagccattctaggtgcaggggatacagcagagaccttgaaaaaaggaacagtctctgatcttgctgagcttagagtcaagtggaggtgaggaggaaggaaatgaattaacaactaagtgaagcagaaggtaaccaattgattgactgacgaaggggtacaaacaacaaacaccttcctttctccaaactctatctttaactgtattctctcgttttccttcctctccattttacaatcattttacaacatctctggctattctcctatatttctgatcacttcggttctcatcacaataataatttcagttttcaagcattggaaagtcccatccaattaaaatgtcaatctcacacgcagtttaaacgtttcgcctgcccgtgagctcagacctgtcttggtgcctcagttcttgtgtggaggggaggagaggagaggggaggggaggagaggaaaggagaccggggaggtggggggggagaggggagggga

SEQ ID NO: 168 - DNA, 899 bp, homo sapiens
ctatctttaactgtattctctcgttttccttcctctccattttacaatcattttacaacatctctggctattctcctatatttctgatcacttcggttctcatcacaataataatttcagttttcaagcattggaaagtcccatccaattaaaatgtcaatctcacacgcagtttaaacgtttcgcctgcccgtgagctcagacctgtcttggtgcctcagttcttgtgtggaggggaggagaggagaggggaggggaggagaggaaaggagaccggggaggtggggggggagaggggaggggaggagaggggaggggagtgggggagaaggggagaaaagcgcagctggcttcctcactctcctttccttcctcaccatccttaccctggcccagggcaggaggaggattggcagagtagaaggcagggtcttctgtcttagctgggcctgttggtgactttctgttggccaacatgggctgactggaatgttctccagcatggcacatggtcatccagatgcaggctcttccctggggcactatagcagagagggctctcttccagtctattgcagatggatgccctcgtgagctgagttttgatgaacatcccatgtccccagccaccccattcagagcctctttctactctggtcctctggtcccagcagcagccctctgggtactgaggggagggcatctcacccaagccccttaaacctgctcaccttcttcagagcccacgtggccgcaggaaagtcacaaacccttgtgctcccacagggcacacgtgtgcacacgtgtgcagctaccttctctctagttggtacctgaggctgcctcctggattttccagtctctgtgttcccagacaaccccaagccccaagaatacaa

SEQ ID NO: 169 - DNA, 1002 bp, homo sapiens
agtttaaacgtttcgcctgcccgtgagctcagacctgtcttggtgcctcagttcttgtgtggaggggaggagaggagaggggaggggaggagaggaaaggagaccggggaggtggggggggagaggggaggggaggagaggggaggggagtgggggagaaggggagaaaagcgcagctggcttcctcactctcctttccttcctcaccatccttaccctggcccagggcaggaggaggattggcagagtagaggcagggtcttctgtcttagctgggcctgttggtgactttctgttggccaacatgggctgactggaatgttctccagcatggcacatggtcatccagatgcaggctcttccctggggcactatagcagagagggctctcttccagtctattgcagatggatgccctcgtgagctgagttttgatgaacatcccatgtccccagccaccccattcagagcctctttctactctggtcctctggtcccagcgagcagccctctgggtactgaggggagggcatctcacccaagccccttaaacctgctcaccttcttcagagcccacgtggccgcaggaaagtcacaaacccttgtgctcccacagggcacacgtgtgcacacgtgtgcagctaccttctctctagttggtacctgaggctgcctcctggattttccagtctctgtgttcccagacaaccccaagccccaagaatacaagagctctgtcaccaagcatcgggcctgtggctgcactacacgtctgcagctcaggacccctggctgcggcgtaagctaccagcatccccttctcatgggcaccctcatctccggctccccatcgctgggctgtgacctgcgggggcgcccctctatggaagggaaggagaaaaattcacagtgctatctactcctctgaatgcactcccaccaatttccttggaaatttctagctttcactgacatatctgggatggggcggtggtcacaaaa

SEQ ID NO: 170 - DNA, 1002 bp, homo sapiens
gtctctgtgttcccagacaaccccaagccccaagaatacaagagctctgtcaccaagcatcgggcctgtggctgcactacacgtctgcagctcaggacccctggctgcggcgtaagctaccagcatccccttctcatgggcaccctcatctccggctccccatcgctgggctgtgacctgcgggggcgcccctctatggaagggaaggagaaaaattcacagtgctatctactcctctgaatgcactcccaccaatttccttggaaatttctagctttcactgacatatctgggatggggcggtggtcacaaaatcaatcccactttccctcggctagtcttacaagcacccaacagctctattcagaatacagggctgcccagctacttcccattcattatccccaggttgcaagctttagtcaaaacccagaggcagcagggtgtctggttccacctgctgttaggatgatttcaggagtgcaaagtgttagaaacgcaggtaaaacatgatgcttagagattaagtgggatggggactgggcagatgatgctgctttggacccagcgagtgaggtgagactgcgacaagacagagccactgagcagtgacctgggggatgggcattgcaggcaaggcagaaccccaagtgggaacaacctcactgggcttagcaaaactaaagaggcccaaagtatactgagcgatgaggtgagtggcgtgggataaggttggagaggaggctggaaccagaccctgcagggccttgcaggtgatgggaaggagtttggaaggtgctggaaggtttgaagcagaggagggatatgatcatgcctgtagctgctatgtagaacaactgtatgcatgccaggcctgtgccacgcatgctctaatcattactggctttaacccttgcactaacgttgtcatgcaggtaggagcatctgcacccagcaaatggaaactgaagctcaggaatattcagtcacttgtccaaggct

SEQ ID NO: 171 - DNA, 1002 bp, homo sapiens
acctgggggatgggcattgcaggcaaggcagaaccccaagtgggaacaacctcactgggcttagcaaaactaaagaggcccaaagtatactgagcgatgaggtgagtggcgtgggataaggttggagaggaggctggaaccagaccctgcagggccttgcaggtgatgggaaggagtttggaaggtgctggaaggtttgaagcagaggagggatatgatcatgcctgtagctgctatgtagaacaactgtatgcatgccaggcctgtgccacgcatgctctaatcattactggctttaacccttgcactaacgttgtcatgcaggtaggagcatctgcacccagcaaatggaaactgaagctcaggaatattcagtcacttgtccaaggctccccagctgttaggtgctaaggctggattcaatccaggacttgcagactccagtatcttggcttttctaacgagagtgtgctagctttctaatgggggtggggaaggcagttctgcccccctcccatggcaccgtgagcaggtgtcactgctccagccagtacgcctggacaccgactaggaaggagtatgtgctactaggagggatggtctgggctgactctttgaagttgacaaggagttgcataatcccagctaataattatgctggaccaggggcagagacattactccaagggtgaccaggtgtggagaagaggctgctgactccggggccccaggacctggcccccaggtctcattgcccgagtgctgccccagaaggagtagaagctggagctgtccgggccacagccgaggctgggtgaatgctgcagtgaggctgccgcacaagttgcgtgttgtgacatttgtcttctggaggggattgggatgggctacttcagcatttaaaaacccctactaggtctgagaaatcccctcagcttatgagcctgggtgggcagcaggccttctcaagaagcccagaaggccagatgctcacttcccagg

SEQ ID NO: 172 - DNA, 1002 bp, homo sapiens
cagtgaggctgccgcacaagttgcgtgttgtgacatttgtcttctggaggggattgggatgggctacttcagcatttaaaaacccctactaggtctgagaaatcccctcagcttatgagcctgggtgggcagcaggccttctcaagaagcccagaaggccagatgctcacttcccaggctctcttgcggctgagctgagagcaggcacctgaggcctggcaagtgtgacagctggtgacacagacagacagggacagggagatgggactgtgcctgcagcggtagccctggccggtgttcagtggggccagcatccgtgtctttcctgggggccagtgggggccgtggctctgacgatgcatccctcccccacgttttttctcttcttgtcttggactttgcagggagcactctgcttttgggaacaggagctgggtctctggccattctccgcagcccctcaccattcactcagtggctctcaaaaaatagaacctgggagcaaagctgttcttggccccaaacaacatgaggaaaaataaataaataatgtacctggtaactgagagagttccctctgcatcttgggctctttcaatgagatgtcctctgcctgcagcaagccccaagggcttccctcaccaggaccagcaccctggtttgcctgaccccacacctgccaatgccggggcaagaatgtcccaggctgccctggttcccagagctgatgcttcccacagtgcccagctgtgctggcatggagctaaggacagggccagtcccaagaaaacaacaaggctccagggccaccggccactgctcaggaccctggctgaccccacagatgcggagtgcctgagatggctcatgggtgacccccaggcatctggcaaaggtcacaatggctgtttggcttgaagacagcccttgcaagatctgttttgagccaacctgtggcatttagccctccctgggtgacaaataaaaaggctgaggcttgta

SEQ ID NO: 173 - DNA, 1002 bp, homo sapiens
attggaagataagaatgcagccaaagaggtcttcagggtagcgtgtggcctgggcgctgagactattgggcctagcaacttctcaagcagtctattaaccacagccggtagccagcttttccccgcccttctcccaggcacacacagccacctccatcaccaaaggtcaggcgaaccacctcccatggctacccccagcctgacttgctttatagaaatcatggcatctcatcctcacaacagcccacactcacagtgaatcttggccattatgacaactggggacactgaggctcggagtggtggaaattctcagaatcacataacaataagtgttaaagtcagaatttcaacttcatctctctaactccaaagggcgtgtgtgtgtgtgtgcgtttctggccataatcatattgtgccctacaagccccagtgaggaatctgctaggaacactggtttggggaaaaaatgtaataaaatatgtgatccagaaggcggcctttggtacctgtcataaaccgcagcatggggtactcactatgcctggggtctgggctctgaaggcatgattgaatgatctcactgcaggcctggttgtcctgcgaagacacccgtcaatacatgaatattgacacacaacgctgcagtgcacgcgcttctggcaggggagctgctgcactcgagggcagctcaaggttaatttgcagggttcatgtttggagtttctgagcaagtgttgcagctttggcccccagccccctgaggggagctctggccgtgcatgagggtcagacagaaaatctcctttcctccatccaggcctgcagtctgcagcactgaggtcagcgctggccacaagcccaccctgtgcctcgtcagccccactgagcctctccatctatcatgccacaggctgaccctgaaatgcaaaatcattctgtcctcccgccctccactcccacctcgcacatctatggatttgctgttcagaaaacatctgt

SEQ ID NO: 174 - DNA, 1002 bp, homo sapiens
agttagattgagctgggtcccatcttgggcctttgctggtccctccctagaaagtctgccccctccccctgcagggtggcatcagcattcaggcctggccctgacgccctcctctctgggccaccttcacctccacaaccccggcaccagcacccatccccaccacatccccagcacgcagcatctagtaagggcaccaaatgcatgcccagacatatgagtgaaatgaattaaccctgaacctgaaaaagggcaaccaccacacaagattctctagaaacaatgtgaattgtgcagaaggaaattaaccctactccatccagcccatcctaaggcagggacttggacctgttcctcttgatggggctggggctgaggcgggcaaggcaggcaagtgctgaacagttggcaacattgcccatcccgtctccctgcaccaggctgggcctggggtgagggggtgggggccggggtagctgggctcctccagcaaagagcaggtactgagtccctggtgactattaggtaaaaggtccctgacaattttgaggggccagatgccaactcgagggatacagagaagatctaggcacagtctttccccaccatgtcagacaaaaaggttagatacaggacctgatatgttataaaactcaatcaatatttacttagtgaataaatggacggatggatggatggatgcattaggcagccaagtgggcagcaccgatgacttaatgtactgagtgctccgactccagcaacatgcattcattgttcctactgtgtgccagtgaacaagagcaatgaactcaatgacttctgcccagggtgggccagggaaccagggaagactctccaaaaaggcagcatttgggctgggacgtacagatgagtagggggtcgagtgtgtcgttatgtcgctggagcccagaggcgtccatcaggacttgggggagggcagatgaaagggccttactgcctaacttggagccactgtat

SEQ ID NO: 175 - DNA, 2002 bp, homo sapiens
cccatcttgggcctttgctggtccctccctagaaagtctgccccctccccctgcagggtggcatcagcattcaggcctggccctgacgccctcctctctgggccaccttcacctccacaaccccggcaccagcacccatccccaccacatccccagcacgcagcatctagtaagggcaccaaatgcatgcccagacatatgagtgaaatgaattaaccctgaacctgaaaaagggcaaccaccacacaagattctctagaaacaatgtgaattgtgcagaaggaaattaaccctactccatccagcccatcctaaggcagggacttggacctgttcctcttgatggggctggggctgaggcgggcaaggcaggcaagtgctgaacagttggcaacattgcccatcccgtctccctgcaccaggctgggcctggggtgagggggtgggggccggggtagctgggctcctccagcaaagagcaggactgagtccctggtgactattaggtaaaaggtccctgacaattttgaggggccagatgccaactcgagggatacagagaagatctaggcacagtctttccccaccatgtcagacaaaaaggttagatacaggacctgatatgttataaaactcaatcaatatttacttagtgaataaatggacggatggatggatggatgcattaggcagccaagtgggcagcaccgatgacttaatgtactgagtgctccgactccagcaacatgcattcattgttcctactgtgtgccagtgaacaagagcaatgaactcaatgacttctgcccagggtgggccagggaaccagggaagactctccaaaaaggcagcatttgggctgggacgtacagatgagtagggggtcgagtgtgtcgttatgtcgctggagcccagaggcgtccatcaggacttgggggagggcagatgaaagggccttactgcctaacttggagccactgtatgtttcaaaacaaaggagacgagaggatcctgggaaagagaaagggtactctaggcagaggatgtgaatgggcacagcacaggtgagaacatcaagaccaggggtcagggaatctactggtaaacaattgtaccccaagggagcaatcacagcctctccatccacagggaaatgcctggtggggaggaatgggaggaaagaaacagattgcatgactgtgtcttgaaggtctaattccagagtacagcatcacccctatcttccaggtccagaaactgaggctcagagggagactttctgatgagtgcagcgtgcagataagagcatctccaaagctacctccttccccagtcacaccagggcataagcaactgataacagctgtcagcacgggacagtggagggaacactaggttaggaataagggtacgaggcttgagtacagattgtcaatgactcagtgtgtgaacttggtcaggtgactccaaccagatgacttccttctctgagcttctgttccctcctctatgaatggggacaatcactcagcttcacaaaacaatggctgcgaaattgcctggtacaagagagagaacttccagtgtgtaggggctgttgtcctaactgcccagccccctagataggtagttatgtcatctgtgaaatgggtgttagaattcctacctcccaggacagctgtgggcagaaaaccaaagaatgtgtgtgagagcccaagcaccatgcctggcacatagtaggtgctcaggaaaggctgagggtgcagctgctgtccacacacatggtaccactgccccaggaaggggcttcaggaaccaagagcaattctgagcactggtgactggactctgccattctccatttcaaacgctttttgaaagcagctccagacccaagcaggagagcaggaggcaaaagaaacgcaggggctttcccgaatggaattttagaaacacacagaattgtctcctgcacagaagggaagctgtcttccacagcaca

SEQ ID NO: 176 - DNA, 1002 bp, homo sapiens
cactggagctgagactcccaggtcccctagggcttctctcccaggggcctctgggctccccaaggccacgtgctgcccccactagagacctgggccagtcctgaccaggggaaagagtagcgccgacaacagccccagatggtatgtgcactggcacatactggcagctgccttcatgacagcaagccataggtccaaatcccgccccttcacagggacattcccaactggtcaggggtggacctccccttcccggctgtctttggtgtccaggacgatttgccacagacagggggagctaaaggggcccacgcttgaggccgctcagctctgagtcctcgccggccacagaggaccttcgtgcctgtcctctgtcctcctgcccagtccccaggccaggctcagctggagttggggagcagaaaaacacgcatctgaatcaaggctctcggagcctttgcttctgcctccaagaggcgagggaaaatgaatacccaggcagagcgagcaagagagaccctcagaaaaccccagatgcccctggaatcaagccctgtcccaccaacgccacgtggattgacaggctattagtcttcctgtaattaggattctcgcctcaaatcttgtatctttttcccccagaagattctcctccagccttcaccactgccccctggcgcttccttgcaaggcttttgaagaatcctttgcagagaagcagcctcctttggcaggggctgcagagcactctgcctccctaggccagggcgaaccaacagaggcgggagatgaggaggagcagcgcggctctgctgcgtggccctgggcaagcaccacaacctctctgggccgtttgcacattcttaccgccagggatgtgggcggtaaatgaaagagaccagcacaaaccagtgtcagctcccttcctcgattcctaaaatgtgatgcccaaagatgggccagcctcctgctgtgccttctctggggggacatttaataagt

SEQ ID NO: 177 - DNA, 998 bp, homo sapiens
tggccgcctcttccagataacaactctcctctccttccctgccctcctgctcctcctgttcgcgctacataacagactctgtggggccttggtttatgtatttccttctctcccctactgaaatacatgtgagcgatgctggggcaggccgactagaagaagcagactatctgcttcttctccacccttagaatggtgctgggcccagaagaggcatgcagtcgatatttgctgaataaatgaatgtcagataaagtggtgtggggactccaggggaaagatttgtcattctccaccctcccagttcagcttaaagcagagaagtgagaggtgcccaaaaaggggtgtgtctggggggtggggggtggggatgttccaagatctccaaggcctggattttaagcaaggtttgagatgccagcaagagggcctggcattgccagattgatagtctgcatttcagagaaggacaaccccacctctgaccttagcccagagcctcaacagcctgctcaaggagatccacccttagtaggaggaggcagccaggccaggttccagtccctgccaccgcttgccaggtgtgtcttgggcagcagttgcctttgctcggtggtcttcagctttgccccctgccaggcacgtgctggcctcctgcctgcatcgtagctcatggagtcctctcagtcacctctgtatgccctgcagcatccccagttctcagtgagaagagtgtgctctgaaagttaagtaacttacccaaggtcacacaaggtctgagtctcaaatgcatacaatttgaccccatagtctaaggtcttgaccgcaatggaataagaaattattttaccattctgagtggcagtctctgaagactacagcaataattgatgcctctcagggggataggtgtgtcacttacaggtgatagtgaggttgtcctcagcctccctgctcttcgttagacctccctcctcctctctacccgggccaagcgt

SEQ ID NO: 178 - DNA, 1002 bp, homo sapiens
gcggaacacctctgccgcacctgcagcagccttgctctatttcttcacaagcttccccatgacactgacccaaggctgtctggccactacagctgctgatgatgattagcaataataataataataaacgaaatgccttctgcttagatcatctttaatttcccctccagaatgacattcgactctgcttagagttacaggcagcccagcaattactgagcgcaaataccgtgttcacccgcctcacctcatccacgcccccacaacacccagccctgagactggctccacgatcacctccactttataaaataagatatcaaactctgaacagaacggacgtctcaaaaaatgggcatattacatttaaaccctcaatctgttgggtatttgagtgaaatggacatacctccagggagtcggtggcgagggccggctctgaggacttcctgggttgggatcctggctctgcaggactgcgtgaccttggtgagttacttctatccctccaaacgcgctgttctccttcatagaatggagatgaccacagggccagattcataaggttgttccttgtaatacaggtgaatatccatacccagcaactgctggaccacctgtggtttcaaggataatttccctcccacgtccccgtggcccttggaaccttcctctcctcctgtctccccctgcccccatcactttgtaattgaaaagtcatgattgctctcccaggtgtagcactgctcacaggtcagattgcctgctctgacgtagtgactcagttggatgcggttcagctgtgtatgatcaactccctccccctgacaaaaacattattttgcatcacagagaagttgatttctttcacacataaaagaaggcaaaaagtggtgcctaaagggctggtacagcagcttcaagaaatcaggaagaacctgggctccttctgccttcttgttctgccaatatcaccccatggctgccacttcatggcccaag

SEQ ID NO: 179 - DNA, 2002 bp, homo sapiens
ttgtgagtagggcacgcagggaagaaacctgttcaacccagccccgtgctagaaagacatcagcagggcctgcaaaagccctgattaaatctcacaagtttgcacctggagccgccatcttgaattgcaggtgaatatcagcctttggtttgggctgtgtgccccagatgatggtggtcccaaattacataggccaatatccagagctgggttaaaatgaagcatttcgaggaaaaaaatgcaatgaaatttgtttaaccggtacttcaggcttttgagcacagaacagcgtccatccctccaaacacacactgaggatatacacttagccaggagggaacataaggaggggtggacaagccatgtttactaaaatctctcagtgtgtgccaggcatgttcatgtatattcaggaagaagtgtcagtatttaagatcctcggcccttgcccgagtccccaacacgccttcttgtctggagaactgtaaatcttggaaacatcttgcaaggggggacacctcacagaaggcaggcttggcatgggataaacagaatcgactcctctgcttccttctgatgcacagtgaatgggcaggtggaagcatcgttgcttaaagaggaaccaaaactccaccccagagctgctaattccttttggcttgcagttatgcagagggctaaaaaatccaacgaatcacaaatcccctggttgctaagtagaaagaatatgttttggctgctgctgttcccttccccaaggaaaagattcaagcagaggcggtccccacctctcaacacagaaagcaacatctctgattgcctctagacacaccttcatgctcgtggcactttgggaccctctgcccgctggcttatgggcatggcttccccatcactctgggtccttgggaagagcctctttcccagaccccacctctgtgcctcatcacatttctcccaggctattgacttgttcaaggttaaggtatgaagagagtcactgcagcagccctacctggctctgctctgctgggggaagccttttcagagcctgcctcttcctcagcatgaggggctgctcgggcccagtcccagaggccatgctggtcccaggggaaggtggccgtcatccccatctgtgttttctcttgcaggtaagtcatgctccagcagtcgggagggttgtgtgatgacacacttggcagtttgggagcaaaagccgccacagtaagacacaattgattcattgcctctcaaccctctgctggggtggactttcatgcgtggacttctgtccccaaagaggcttctctgggtctggaaagggccctagccttggttgggggaggcaaaggggtggcggcttccaggtaccatctggccaggaaccggctccattgtctgtgcatgtagcttgcactgggctgcctgctccaagggaggcatctccccacgatctacgacattggcttcaaagagctgctcctggcagcttcgaatggctgagacctactggcatgggatggaggagtgcagggagcttcccgggacctcgctagtcctgcctggatgctcagaaggccctcgtcctcggtggcatgcagcctcggccatttccaaactcacggcatctcacccagccatgtcacccacccccggctctgtcgcccttcccatcacctttctcccacccatcacctcacatcaaggtttcagccagcgggaaccaggtttagactccaattacctgtgcgtgtgggaggttggattgtgacatctttggagggccgggcttctgaagcgacatttgatttctggtactgaaatgtcaaagggtcctgaggcacccgctagggcagcacgcggagcatccacctgcgtgcgcatcctgggctctctctgggccacttggtgctggggacatgccgggagctggtggtcagccctcctcctgcctcctcagtgctgcatcttcaccttctgcagctgcctaccagaagca

SEQ ID NO: 180 - DNA, 1002 bp, homo sapiens
acaccttgactttagcccagtgcaactgactccacatttctggctccagaactgtaagagaatacatttgtgttttgttaagctagcaaatttgcagtaatttatgacagcgctatgagaaaccaaaacaccaggattatgccccaaggatcctgatgccctccctcctctctgctctgcagtgtgctggagctcacagggctctgctgctgggagttagtatctagtccaacactttacccactcaccccccaagctaagggactcctgaaatcagggaccagatgcataataggtgcccaggaagtgagactcgccttccccagattaagaataaagaagacaaactatccacggctgctgtgagcctctcatcagacctcagcttctagggcagggtccctgcctgtctccagtatgtggcctctgtgtcttcttcgccctccatccccacagtgggacgagaagtcatcaggaaggcaggggatctgcaggcagccagtcagggctctaattgcagctggctgggggaccatgggtcagggctgccaccccctggctctgtgccttcacctgtgtaacgaatggggcactcacagcccctctcaagtggtcctggggatgaagtgagaaggtgacatatacaagtgagttatacacgttcctgttctgtcactcaccagtgctcactgggtgggtcactgaactcccctcagcgtttccttctccatctgtaaaccaccagtgcaaacctttcccagatagtgctgacccgaagcaggaaccagtgcccctctgccctcagtaagtctgccagcagaggaagcccatagagggtcttgggaaatgaagccaacagagtcaagagggtcagatgatgagggacttcaagtgccaccttcatcccattctttctgcaaatattcaccacacacctacgtgacctcaggctctgtgtcaggtcctggggatgtaatggtgtccatgaagaaacaaggtccc

SEQ ID NO: 181 - DNA, 1002 bp, homo sapiens
tccccagattaagaataaagaagacaaactatccacggctgctgtgagcctctcatcagacctcagcttctagggcagggtccctgcctgtctccagtatgtggcctctgtgtcttcttcgccctccatccccacagtgggacgagaagtcatcaggaaggcaggggatctgcaggcagccatcagggctctaattgcagctggctgggggaccatgggtcagggctgccaccccctggctctgtgccttcacctgtgtaacgaatggggcactcacagcccctctcaagtggtcctggggatgaagtgagaaggtgacatatacaagtgagttatacacgttcctgttctgtcactcaccagtgctcactgggtgggtcactgaactcccctcagcgtttccttctccatctgtaaaccaccagtgcaaacctttcccagatagtgctgacccgaagcaggaaccagtgcccctctgccctcagtaagtctgccagcagagggaagcccatagagggtcttgggaaatgaagccaacagagtcaagagggtcagatgatgagggacttcaagtgccaccttcatcccattctttctgcaaatattcaccacacacctacgtgacctcaggctctgtgtcaggtcctggggatgtaatggtgtccatgaagaaacaaggtccctgccctcatagagtggcctgacatatgcccgaggcagtcagcagccgagtgcgggagactcttgagcagagattgagtgtgttgatatctgtaggcatcagcctggctttgctgagtgagctatatcagagtggaggaggccagaggcaaagtccagactccactggatcctggattgaggggagaaggggctgggcggaggagcagcctgagcacctgcatctcactccaactgggtgctgatttgtccccatggccccagcacccaggcaggtcaccaagtaagctcaagacaaaaatgatgagtgactcaacagtg

SEQ ID NO: 182 - DNA, 1002 bp, homo sapiens
ataaattggatttcatcaaaaatttaaacttctgctccaaaagacactcttaacaaagggaaaaagcaagccacaatatgagaggaaatatttgcaaagcatctgataaaacatgtggatctaaaatatgcaaggagaataacaactctattttccactaaggaatgaatgactgtacaaggaccacattctaattaggagcttctgaacccaaaggaatttcagataaggggaaatttaggcccaaagccaggagaaggggtgagtagggcttgatctctgcctctgaagggcagagggcgtggactattcttggctcttaggggacagctagagaaatgtgggtctcatggcgacaactctggactccattggaagaaccttctaacagtcagggctcccagagataaactagacaagtcaccaagagaggcagtgggtacccctcacaggaggggtgcaaatcaaagccaaggcttggagtggaccatattaaatccattttcttatcctgtgattcttagagtcctatctgtatcaggggaaggcaggtgggttctagaactttctaaatgtgtccctgtgggtttttccttctccagctacacacaaacttgggcctaataagaagtctatggcattaacccagcaggaatgcttaatgcttatatctgacctcaaaccaagactgtctccacagtgaacaaccccgtcctgtcccctgggcgtctccttagcaaatgccatcagtcaatggtgcagccatcttggagcccttgccatctataatcttctaccgccacccccccagctgattgttttctttgtatgtctccttcctggacattacttattctttacttttaaatatttgcttccgtaaaaaaacaaatgaatgcctcggacagatttataaagaacattcctggagaggcgggtggattaattattcagcatcctctccctttgtaactatttattgtctcatatgcatttatatgg

SEQ ID NO: 183 - DNA, 963 bp, homo sapiens
ttgcccaagtgatgttccatgtcaggctctagggtccctgcagggacagagagggactaacatttacttacatgcctatagtatgtcaggcatatacttgtgcctttatatatatcagctctgtttttgtcattaaaacatccctgtagaaagataggcactgctgtcccattttacagatggggaaacccaagctctgagtggttcagcaaaccctgggtgcatacccccaccttgcccctgcaaaaccaacaaaaaaacgaaggccctgccttcctggagctgacatttaggttgattctgaaagtcagtaggcccagattttcactcttcatttttcttgtttggaatgagagagcacacagctgggtcgggggaaggagcgagggtctaggcctgcatccactcaccccaaaggaaaggagtaggggaccagtctgctggacatgcagacagcgattggagaaaagtcagcccagctatgaaccccattcctttcagtactgagccaagagggatggcatctgtcagagttgctggatttgggattttgcatcttgccaagtgtccatgaggaattggggaaactctccccctggctggactgaggcttcagcaagcattgttgctgcccagtggtgatcagctcagtgtccttggaaaagagcagaaagtggtatcacgaacatatcttctcctttgcttccttctcctcactcttcatcatcatcatcatcatcatcatcaaatatggatctgtgaggctacctctggggttgaaacttggttttgggcaaaatttgtgatgttctctctgcccaatccagcctcaggctacaaatgaatgtaaaaatctctaatttagtgccaagtaacagaaaacagctctacttatcttaagccaaaaagagggacttctcagaggcatactaatggaggatggcaagagggcctcacgtggaa

SEQ ID NO: 184 - DNA, 1002 bp, homo sapiens
gctcttctgctgtggaggatccatgccattgacctaggcacccgttttccacatattgagcattgctgagcacctattctgtgccaggcactgtgcttcagggccatgggggatgctccaagcggtaaaatgcaaccaaagccccgaaggagctcacattctagtcatgtccacaaagaggtaataaatccataaattgtatgtactattctagtcacaataaaattgtgtcgtactgtaatgctgggtatccattttaaaacggggggcatcggctgaatctgggtcattacagtaggaaatgcatatatataatcatttactcatgaatattaatgtatttaatgagggtaaaagatattacttaaagcaaagtattcgttccagctactgttggatttgttcattactgtttcccatgcagatattacctgtgatttacctgcatatcaagcatctggaagtagctcaaatccacctgtgggtaaattaggttagccagtttgttggcaaaaattacagtgttaactaatttccagggtatgcttgcagtcagtagtttcatacttaggtacatgacttgcattcacatcatctggttaatggtgtgaacagagattttctttatggtttttggaatacagtaagataatgttaagctaacgtaagtctgttaacagtacctggttctgaactgtatttataaggtgtatcataaaaccattactttggagtttgccaatcttaaattcagaacaattcaaaaatgagccagaatctagtttgcatcattaccacttataaaaataaggatctgtaagttggctggataaaatatattacaaaataatgacttaagtggctctggagccagcacaaaagataaaaattgggtatactcaaaattaccttcaaaatatcttaagtcattcttaaaatacatgtaaatatgccaactcaaaatacatccaacaaaactaatatttttcccaatttgttgga

SEQ ID NO: 185 - DNA, 1002 bp, homo sapiens
tcgacgtttccaaagtcatggggcctatggtttgtgagcttatttaggttgtccccgggcccagcatcaaaagcattgagacacgtactgagggactcttttcctagcctctcagtcctgactgctcaaggaccaagtggtacttcttgcctgcgttcctttaatgcttgcctaatatgagctagtcttctctgatcacttttttttttaatccaaagtaggtgggcattgtcccaagagcctttggaaagcagctgcctctcactaggacttcacagcatcattttgctttgctctctttgtggttaaaattaccttccattcgtggtgggtgtatgtcaggatccccacaagaaacagagggacacccaaattagggacatacttcagagggactaatgacaaaggcatgggtgggagtagaggggaatacaagggagacttcaagaatcttggcctttattataaatgcaatgtatgtccactatggaaaatttgggagaaaaaagcaaactagaaagaagaaaaaccacattgcctgaattcctactgcatggagagaagcatcataaacaccttttggaggagtctcttcttcctttctccctttctccttctttgtatagagaggtctttcctgaggacttcccagaatcttgcagatccaaaatcttaagaatttgcagaggcagtgaggagttaacatgcacagctcagggaatattctgctttttatctggaaccaggctcggaacaagactccttgcttttctgtcctgtgttttcatcttctctcagaaccctaactttgagataagatctttgactattattaggcgggtgcaaaagtaattgtagtttttggcattatttttaatagaactgcttctgtgtcctcagatctccatcgttcatctcctgataagtccctgaaaatttcctggccccttggagctccttccaggagtagaatgatcacaagagctgccatgtattgcttat

SEQ ID NO: 186 - DNA, 1002 bp, homo sapiens
ttgcttattccaacttggacttgccggagtcccatagacagaggctactctcccaccgtgctgaagctggtgcatgccatgtttcagtaagagaaaggagggtgcctgggcttcgtctccacccaggtgcctctcccccagcagctgcaccaggccagctgagggggattttagcccgaatccagggtttctcctacagaagacaaggagtttgggcactgccagaattagaagaacagaaagaaaatgttctggatttctcatcaaatgcccctagcctgagaaatataactaaattcacccttaggtcatcttacaatctgtcctgccccagtgttccccactcagggaactgctccacccacatcctggtccccaaaccagaggcctgggagtcacccttgacatttcctcccctacacccctaatcaatcaaatcctgtttatcctgccctctgagagtctgcaccgaaatctctctcctctccttcccacctaccagtggcccagcagctttaccatcatgtctcacggatctctgcaccgctcccaactggcctgtgcgttcactcctgccccctcctccagccctgtgtacactcccttccaccatcctttctatactctcctcaatcctatctgcaccctccttcaaccctgtctgtactctcctccaatcctgtccacacactccaaacaaagtcatatttccaagacaaatttgaccatgccactttctcccacagctctccaccacctccaggatcccatcctcagtgttagccagacactcccaaggccttgtgatctgccctgcctatgtctccagcctcatcctgcaactccccctacactctgtgttctggccatcaaaccaatgggctcctcttcctgcacccccatccactcttgcacatcctgcactctatgtctgaacagctcggtttctcttcttttcttctggcacatgtctgctctacctgcaggtcatcttagatgtca

SEQ ID NO: 187 - DNA, 1002 bp, homo sapiens
aaaagggaatttattggctcatgtaactgaacttcaacattttacagaatctcattggctccaatgggctcatacgtccatccccaaaccaatcacagtgactgagggattatccaaggatcacactggccactttcacaggttttatccctaaaggaaatcacaggtaatagatgtggggctgcagaaatgcaacatgcacttttccttgaaactgcatcccttttccctgaagatgaagcttgaaagaactctaagaggttaagcatggagctgatgggcaagccacaggcagaaagagtagctgtgcagccaggctcctggccagggagggcagataaggaggggaggcaaagtttggtaaacaggaagctaatctatgggcaagaatcattttcttcagcatcctgacctctcctaaaatgttctccactggtccctgctaggacaaaggaattaccaccagactagagtcaggagtcctgggctggttctgctgtagtgacacaggacaggtggcttgcctggtctgggccacagcctcctcccctgttgatgagcatgttggttgttccagcaccatgtcagccctagaaatctctgaattcttgaccagatcagtaattgctctcttgcgtttacttttccttcaaataaagagattggcatacaggggaggagcccagtacagacggcatgcttggctcaggttccagaacccagaaaccagacaagagttgggaaaccatgatggtggaggagggtgtgccactccttactagtgcctaatctcttcgagacactaatgtttcagtattatccacagattctgatgccaggcagcccagatgactggggtcagttattagcatgcttcctggaggtggttcccaggtgcaggctacctgcagtctggctggatgggccctgcaccacacttgcttctgggaagctggttttggggttgccacaatctctgaaagaatcactaggccaccctct

SEQ ID NO: 188 - DNA, 1002 bp, homo sapiens
ttcacaggttttatccctaaaggaaatcacaggtaatagatgtggggctgcagaaatgcaacatgcacttttccttgaaactgcatcccttttccctgaagatgaagcttgaaagaactctaagaggttaagcatggagctgatgggcaagccacaggcagaaagagtagctgtgcagccaggctcctggccagggagggcagataaggaggggaggcaaagtttggtaaacaggaagctaatctatgggcaagaatcattttcttcagcatcctgacctctcctaaaatgttctccactggtccctgctaggacaaaggaattaccaccagactagagtcaggagtcctgggctggttctgctgtatgacacaggacaggtggcttgcctggtctgggccacagcctcctcccctgttgatgagcatgttggttgttccagcaccatgtcagccctagaaatctctgaattcttgaccagatcagtaattgctctcttgacgtttacttttccttcaaataaagagattggcatacaggggaggagcccagtacagacggcatgcttggctcaggttccagaacccagaaaccagacaagagttgggaaaccatgatggtggaggagggtgtgccactccttactagtgcctaatctcttcgagacactaatgtttcagtattatccacagattctgatgccaggcagcccagatgactggggtcagttattagcatgcttcctggaggtggttcccaggtgcaggctacctgcagtctggctggatgggccctgcaccacacttgcttctgggaagctggttttggggttgccacaatctctgaaagaatcactaggccaccctctgagtgggtccttctgtaggaattatggataaaattgttccactagtcttaccttcttggggaacccttcctggattcccaggctgggctgggtgtccctgcagcctagccccacagccctcctgcttctctttc

SEQ ID NO: 189 - DNA, 961 bp, homo sapiens
tgacctctcctaaaatgttctccactggtccctgctaggacaaaggaattaccaccagactagagtcaggagtcctgggctggttctgctgtatgacacaggacaggtggcttgcctggtctgggccacagcctcctcccctgttgatgagcatgttggttgttccagcaccatgtcagccctagaaatctctgaattcttgaccagatcagtaattgctctcttgcgtttacttttccttcaaataaagagattggcatacaggggaggagcccagtacagacggcatgcttggctcaggttccagaacccagaaaccagacaagagttgggaaaccatgatggtggaggagggtgtgccactccttactagtgcctaatctcttcgagacactaatgtttcagtattatccacagattctgatgccaggcagcccagatgactggggtcagttattagcatgcttcctggaggtggttcccaggtagcaggctacctgcagtctggctggatgggccctgcaccacacttgcttctgggaagctggttttggggttgccacaatctctgaaagaatcactaggccaccctctgagtgggtccttctgtaggaattatggataaaattgttccactagtcttaccttcttggggaacccttcctggattcccaggctgggctgggtgtccctgcagcctagccccacagccctcctgcttctctttctcatcacagtcttgttatctctaccaactgtaggcctgccccactgatggtgtgaataaagggactgggtctctctagcacctagcatagatctgatacatagtgggtgatctctattgaatgaacgatgaatgaatgaatgaatgaatacatttagataattcagattactctttctagctcagcagtgtaaagcaggaagacatgctgtcaatatgatttagggcaagttt

SEQ ID NO: 190 - DNA, 1002 bp, homo sapiens
aacgatgaatgaatgaatgaatgaatacatttagataattcagattactctttctagctcagcagtgtaaagcaggaagacatgctgtcaatatgatttagggcaagttttcaaatctctctggacctcagttttacctcttgaaaaataaatataataatttgtccttacttcatgagactattttgaagattaaatgagataatgtatacactactactcactgtccttacttgaatattcctaggtccttggtgctacattaggctacatagaatgtatttaaagtaatagagtggtatttaataaatattcattttctttccccagaactaccttaaattaatttgttgaaaggacagatggatggatggttgatggaagtagcaggcttccagcagcaggggatggagtgagtgtgtggataccgctggatcagcagaaggttataccattttagagtaactatctcggacttcggagagttcctgggtatgaagcgtttggctttaattaaagtctcagcacagtgttaaatgccattttattttaggtcataattaacactaatgagatgagtggattacaaagagcacacattttgagaaagtgaaaaacaacatctgagcttggtggtttccattttcgcttttccccctcccatgctctgttcaattaaaagttttgagaaaatattacaaccatactccttgtctttgtggtaatgaagcatattaatttgaatgtgatgaatacaatattccactgacttttttattcccttatctacaaaagtttaaaataatggaccaattaaaccaggagagaagaatgcagggtttgcctggggatccaattcagcaaccagagaactgaaagaacaaaattttttgacggagtctgggccagacttcatcccttacctatagctgacaaacagtaagtcaaattgggcagatgtggaccagcgcagaacacatactatattgaggatcgaaaggc

SEQ ID NO: 191 - DNA, 1002 bp, homo sapiens
gtgtaaagcaggaagacatgctgtcaatatgatttagggcaagttttcaaatctctctggacctcagttttacctcttgaaaaataaatataataatttgtccttacttcatgagactattttgaagattaaatgagataatgtatacactactactcactgtccttacttgaatattcctaggtccttggtgctacattaggctacatagaatgtatttaaagtaatagagtggtatttaataaatattcattttctttccccagaactaccttaaattaatttgttgaaaggacagatggatggatggttgatggaagtagcaggcttccagcagcaggggatggagtgagtgtgtggataccgctggatcagcagaaggttataccattttagagtaactatctcggacttcggagagttcctgggtatgaaggtttggctttaattaaagtctcagcacagtgttaaatgccattttattttaggtcataattaacagctaatgagatgagtggattacaaagagcacacattttgagaaagtgaaaaacaacatctgagcttggtggtttccattttcgcttttccccctcccatgctctgttcaattaaaagttttgagaaaatattacaaccatactccttgtctttgtggtaatgaagcatattaatttgaatgtgatgaatacaatattccactgacttttttattcccttatctacaaaagtttaaaataatggaccaattaaaccaggagagaagaatgcagggtttgcctggggatccaattcagcaaccagagaactgaaagaacaaaattttttgacggagtctgggccagacttcatcccttacctatagctgacaaacagtaagtcaaattgggcagatgtggaccagcgcagaacacatactatattgaggatcgaaaggccaggttccagaccgtcctctaatattttcttagtgaatatttgttggatgaatgcatggatggg

SEQ ID NO: 192 - DNA, 963 bp, homo sapiens
cttacttcatgagactattttgaagattaaatgagataatgtatacactactactcactgtccttacttgaatattcctaggtccttggtgctacattaggctacatagaatgtatttaaagtaatagagtggtatttaataaatattcattttctttccccagaactaccttaaattaatttgttgaaaggacagatggatggatggttgatggaagtagcaggcttccagcagcaggggatggagtgagtgtgtggataccgctggatcagcagaaggttataccattttagagtaactatctcggacttcggagagttcctgggtatgaaggtttggctttaattaaagtctcagcacagtgttaaatgccattttattttaggtcataattaacactaatgagatgagtggattacaaagagcacacattttgagaaagtgaaaaacaacatctgagcttggtggtttccattttcagcttttccccctcccatgctctgttcaattaaaagttttgagaaaatattacaaccatactccttgtctttgtggtaatgaagcatattaatttgaatgtgatgaatacaatattccactgacttttttattcccttatctacaaaagtttaaaataatggaccaattaaaccaggagagaagaatgcagggtttgcctggggatccaattcagcaaccagagaactgaaagaacaaaattttttgacggagtctgggccagacttcatcccttacctatagctgacaaacagtaagtcaaattgggcagatgtggaccagcgcagaacacatactatattgaggatcgaaaggccaggttccagaccgtcctctaatattttcttagtgaatatttgttggatgaatgcatggatgggtggatgaatagatggatggatggacagatggacggagagagagatggatgaatggattgttgg

SEQ ID NO: 193 - DNA, 939 bp, homo sapiens
gcaggcctgtgaacctgacacatggtccaggtgtctccctgaggacttctggaagtctccccacctctctgtggtcctttaggcattaacaccaccttgtcactgtgtcttctgaggcagtctggaagttcataccccacaatctctgtgtaccttgtcccccattctgttctctgcattgcagatggtttaaaacacacacacatacacgcgcaaaatgttgttccttttcttaaaacccattgtggccaggctagacaaatccttaacacggtctacaatattctgcatggcatggcccctgggtgcctcccaacctgatctgtcacacaccacctccacctttgcctgttccctgggccctagcactaacctttggttcattcctagacaccttttcagcacttaggcccccacagccctcagaacctttacacttgctgtctcttttgctttaaagtgttcttgccccacctaccacctagttaatgccttttcctccttcagctcttagttgaagcatcacttcctcaaggagggcagccctgatgaaactcattatgcaaactccagcctgggttgggccttatctttatgctgtcatggccctgagtattcttcctttatggcaccaatcacggcttatatgatatacttatgctattatttgagttatgtctgtctcccccagtatgccactagtattagaatcattgatttttaatcattgtatccctagtgcttagcacagagcctggctcataatagatgcttaataaatatttgttgaataaatgaatgagtgaatgaataaatgcctcattcaagagctttggctctttctgtactactacattacttctattttttagctcttaattctcaaagcactttctttgtgctgggcttatgctgggagcttagacagtaaagcttaga

SEQ ID NO: 194 - DNA, 1002 bp, homo sapiens
ttacatccacaggtttgattataaatgtgtgtattgaattggaatttctgttgaaattctgatcccttctagacaaagaaggtaaaaattgaaacatgtcaatggatatctaaatatcattactcactggctttatttgcaaatggctttccattgacaacagttacattttgttcaaagcaacaaatgattggcgctgacaatccacaggaacatggtgcagtcattaatgaatgtgctcattattcctccctgccgggaggcatcgactcccgttctccagcctgttttaagcagacagacctacatctgcacctgtcagcttggaaccctagtaggggagggggatgctgatgtgatggagaatgaagaatgggccctgcaggctgacattttgggagagtaggttctgaaatttatcccaaaggacatggaatcctggaagcagggttcaagatcctcccaaaattgatctcccaggatgcttggaatgattgttcctgagggttttgtaaaatgccaggggaaaaccaggaagcttctctccagttgtcttgcctccttcctctccagtctccatggagctgactttgagaattaactcctgagggacagagaccctgggatggagagccagccctgctggattccacaaggtgctgcttaaagcacaacacctcttcccaatgacaggttctgaaagaaggccttgtagctagatgcacagagggttttgttttgtttttttttttttaacctttcagcatctgtctaaaattgctctgggctgggtacagtggctcccacctgtaatcccaacactttgagagctgaggcaggaggatcgcttgagcccaggcgttctagaccagcctgggcaatatagtgagatctctatgtctagaatgttttttaattagctgggcttgctgcctgcacctgtaattccagctacttgggaggctaaggtggggggatcactcgagcccagggggctgaggc

SEQ ID NO: 195 - DNA, 1002 bp, homo sapiens
ccttctagacaaagaaggtaaaaattgaaacatgtcaatggatatctaaatatcattactcactggctttatttgcaaatggctttccattgacaacagttacattttgttcaaagcaacaaatgattggcgctgacaatccacaggaacatggtgcagtcattaatgaatgtgctcattattcctccctgccgggaggcatcgactcccgttctccagcctgttttaagcagacagacctacatctgcacctgtcagcttggaaccctagtaggggagggggatgctgatgtgatggagaatgaagaatgggccctgcaggctgacattttgggagagtaggttctgaaatttatcccaaaggacatggaatcctggaagcagggttcaagatcctcccaaaattgatctcccaggatgcttggaatgattgttccgagggttttgtaaaatgccaggggaaaaccaggaagcttctctccagttgtcttgcctccttccgtctccagtctccatggagctgactttgagaattaactcctgagggacagagaccctgggatggagagccagccctgctggattccacaaggtgctgcttaaagcacaacacctcttcccaatgacaggttctgaaagaaggccttgtagctagatgcacagagggttttgttttgtttttttttttttaacctttcagcatctgtctaaaattgctctgggctgggtacagtggctcccacctgtaatcccaacactttgagagctgaggcaggaggatcgcttgagcccaggcgttctagaccagcctgggcaatatagtgagatctctatgtctagaatgttttttaattagctgggcttgctgcctgcacctgtaattccagctacttgggaggctaaggtggggggatcactcgagcccagggggctgaggctgcagtgaaccatgattacaccactgaactccagcctgggcaacagagtgagaccctgtctcaa

SEQ ID NO: 196 - DNA, 1002 bp, homo sapiens
ctgatggaactgggatgtgagaagaaggcaggttttctgataaacaattcctgtatctttcacaaatgccaaatcacagactcagcttgggacatatgaggacagcacagactttggaggcaggtagattttgggttgtcacgcagacacccactactatgagacctggatttccttctgacgttattggggataagaagtggcacctcaccatttctaggaaatagtaggtaagtctttctggttgccactgaggtgactcacctgagacacagttgctcctaaagttcaaggttaggagacaatccagaaggggagctgtctgtgaagtcagaattcttggaagaatgtaagtctttacacagtaacagcaaagcagacagtgggaaccactactctgccttcttgcatcattctttcctagaaataccagaaagcagtgagggattaagtctaattcctggcacctgaccttatatctaacagatgctcagtattaccgtgttgatgggacctcactgggaatgttttgtgtgcagtacaaaagggcaatagatgaaactttgggacgggagcccaggaaaatggctgagaggagagcttatgcctagcttatgcatgagcttgcaaaaagggagaatacacgggagggaagatcagcaacagcatgagttttataaggcagagagttgttgggaaggaagcagcagggagaggggaaggagtaagtagaaacctagaagagatacagctaagataagccaagagaacaaagtattgacttaccagaaacatggaagtcttcctgcttctaatttagttccgcatatctggatatgtgaatgcctaaaatcccattaagcccagtgggttaattattacacttgctagggccccagaggagaggaaacacagtaagtcagaaaaacctctgggcaggtgaatttctcaggttttcttctgggcagatgggatctggaatggtagcgtggcatcctggta

SEQ ID NO: 197 - DNA, 969 bp, homo sapiens
cctttccaatattaaaataatattaacattggtaatagtggtactaaacaacttagggtgttttttttttcatttaatagtatatttttagtatctttccaggaaaagatacatggatgtgccacattatttttaatggctcacatggtactccttttatgtatgcactataatttatggaaccagttttctcaccgatgagcatgtaagttctttcagtcttttactgttataaacgaatgatgcaatgaatatccttgtacatatatatttgtgcgcatatgtaggtatccttacaagtggaatttctgaataaatggatatatacaatttatttatgaatttaccttcctacaagtgattcaagagagtgtctttgctccacagtgttgtcaatatagtgtattctcaaaatctgacaccaatatgtgtgaagtgcctgctctgttcccacactttacacaggttctcttatttgcagttaagtttatttaagaagaggaaactgggcctcatggagatctaggaacttgcccaaggacaggtctctgtgactctaagagtgcaatcttcccttttccccatgtcaagcacctttccccaccaggctcactgctgacaatccagtgtacgaagaagggaaattacccccacagagcccaaaagtttaggacatgccgacagcatcactcttttgcctcctcattctctctttcatttccagaacatttgctcactcagtgctgcccagtgatacttagccagcctgattacccatctaataatttctgatactaatataaaaccttcccaaagacaaatataactgagacgcactccagcttaccatagctttcctggtggtacagtttccagggacatttcactgtgtcaaagcagggaccacatatgttccagaccagcttgttgggtttttcactgggaagtgaagacaaattgttgtccctt

SEQ ID NO: 198 - DNA, 1002 bp, homo sapiens
ttcccacactttacacaggttctcttatttgcgttaagtttatttaagaagaggaaactgggcctcatggagatctaggaacttgcccaaggacaggtctctgtgactctaagagtgcaatcttcccttttccccatgtcaagcacctttccccaccaggctcactgctgacaatccagtgtacgaagaagggaaattacccccacagagcccaaaagtttaggacatgccgacagcatcactcttttgcctcctcattctctctttcatttccagaacatttgctcactcagtgctgcccagtgatacttagccagcctgattacccatctaataatttctgatactaatataaaaccttcccaaagacaaatataactgagacgcactccagcttaccatagctttcctggtggtacagtttccagggacatttcactgtgtcaaagcagggaccacatatgttccagaccagcttgttgggtttttcactgggaagtagaagacaaattgttgtccctttgaaaaagcatctttcatctctccatctatctgcgatctaaagcaatggggctctttctgtatgtctttcaaatggtctacactgacacacgttttctctgagctgccgagagaatatgccatgagatgttgccagtgatggttacactcagctagcagaagattagggactggttaaacctttggagaaattgccttgggaaaagaggaaataaaagcaaatattactatgaaacatagagattaccaggtaggaggaggagagaggtggagggaggggtaggagtggaaggaagggagggaggcagaaagaggaaggcagactggtggaaaataaaccgtgcactttagaacagcaggaagggaggcttggaagcctggttttctggctttgaatgaccgcctagcgcttgccggtgcgccagggtgctgtgaggatgtgggcagagggcgagtccgaagggctccagacactgggaa

SEQ ID NO: 199 - DNA, 1002 bp, homo sapiens
gagaatatgccatgagatgttgccagtgatggttacactcagctagcagaagattagggactggttaaacctttggagaaattgccttgggaaaagaggaaataaaagcaaatattactatgaaacatagagattaccaggtaggaggaggagagaggtggagggaggggtaggagtggaaggaagggagggaggcagaaagaggaaggcagactggtggaaaataaaccgtgcactttagaacagcaggaagggaggcttggaagcctggttttctggctttgaatgaccgcctagcgcttgccggtgcgccagggtgctgtgaggatgtgggcagagggcgagtccgaagggctccagacactgggaatagtggtggtcgtgtgctcctccctgaaacttttgcactacctcggactgattgacttgtcagacggtaagcgaaccctggagcttccccgttttctgtgaatgtgtttttgtggcttcggttgctgtgacgagtcgtttcgaaaatgcacggaaatgagggcggagacccgagagatttgaaaaagccgggctgaaacagcgtggtattggtccccgcctccccagtcgcgccccagtgctgcgctgtccgtcgtgctgaaatgtggtgcgcctggggagtgcgggagccaggaagttagggtctcctgctccggccctatgagcatgtgagtcttgatggattattagctatgggtgaggccagcacaacacatcacaattctctctgaagctgtctggtaactacgtatattgttgatggaagccagtgacttttaaaagccattatgttgattaacttttttaaagaagtttaggagattatatggaggtaaaaacctttgtaaaatgctaatcacagtgtctgacaattagaacacatttaataaatgtcagtttctttgctcaacccttataagaacccttattccaaagccacctcctcagctctgacttcagctccattcctta

SEQ ID NO: 200 - DNA, 928 bp, homo sapiens
tgctgtgacagtcgtttcgaaaatgcacggaaatgagggcggagacccgagagatttgaaaaagccgggctgaaacagcgtggtattggtccccgcctccccagtcgcgccccagtgctgcgctgtccgtcgtgctgaaatgtggtgcgcctggggagtgcgggagccaggaagttagggtctcctgctccggccctatgagcatgtgagtcttgatggattattagctatgggtgaggccagcacaacacatcacaattctctctgaagctgtctggtaactacgtatattgttgatggaagccagtgacttttaaaagccattatgttgattaacttttttaaagaagtttaggagattatatggaggtaaaaacctttgtaaaatgctaatcacagtgtctgacaattagaacacatttaataaatgtcagtttctttgctcagacccttataagaacccttattccaaagccacctcctcagctctgacttcagctccattccttagtgagaatggggttataaatccaggttaacccgattgtttaggattagaaagtgatttggtttccaacgttgaaggagttcaagaaacaaagagttttatttttcctccttatgagatattgttccaaatagaacacagtttgtctagatgatttttgtcacttaaaattaggctccaggaaagattccaaatttcatgagcaattgggctcataaaacaagatcaaactccaatagtgtatatccaaagtatgtataatgtgtattcggtgtatattcttccaccactgcatggtgtagacagaatttctcttccaaggggcaccacatgacaaaaccgtacataataatgaaatgcatttgtagacaaaggactagctaaaataccaactgaaagtgggaagaccagaaactgaag

SEQ ID NO: 201 - DNA, 2002 bp, homo sapiens
aattgccttgggaaaagaggaaataaaagcaaatattactatgaaacatagagattaccaggtaggaggaggagagaggtggagggaggggtaggagtggaaggaagggagggaggcagaaagaggaaggcagactggtggaaaataaaccgtgcactttagaacagcaggaagggaggcttggaagcctggttttctggctttgaatgaccgcctagcgcttgccggtgcgccagggtgctgtgaggatgtgggcagagggcgagtccgaagggctccagacactgggaatagtggtggtcgtgtgctcctccctgaaacttttgcactacctcggactgattgacttgtcagacggtaagcgaaccctggagcttccccgttttctgtgaatgtgtttttgtggcttcggttgctgtgacagtcgtttcgaaaatgcacggaaatgagggcggagacccgagagatttgaaaaagccgggctgaaacagcgtggtattggtccccgcctccccagtcgcgccccagtgctgcgctgtccgtcgtgctgaaatgtggtgcgcctggggagtgcgggagccaggaagttagggtctcctgctccggccctatgagcatgtgagtcttgatggattattagctatgggtgaggccagcacaacacatcacaattctctctgaagctgtctggtaactacgtatattgttgatggaagccagtgacttttaaaagccattatgttgattaacttttttaaagaagtttaggagattatatggaggtaaaaacctttgtaaaatgctaatcacagtgtctgacaattagaacacatttaataaatgtcagtttctttgctcaacccttataagaacccttattccaaagccacctcctcagctctgacttcagctccattccttagtgagaatggggttataaatccaggttaacccgattgtttaggattagaaagtgatttggtttccaacgttgaaggaggttcaagaaacaaagagttttatttttcctccttatgagatattgttccaaatagaacacagtttgtctagatgatttttgtcacttaaaattaggctccaggaaagattccaaatttcatgagcaattgggctcataaaacaagatcaaactccaatagtgtatatccaaagtatgtataatgtgtattcggtgtatattcttccaccactgcatggtgtagacagaatttctcttccaaggggcaccacatgacaaaaccgtacataataatgaaatgcatttgtagacaaaggactagctaaaataccaactgaaagtgggaagaccagaaactgaagtgtaagatgaggtaagccctggagtaagagtcaagaaatccactttctatccataatctgtctcggtttaatgttggtcaagtcattttttaaaaaattctaggtcttggtttccttatgatgactttagatctctgttccttggaattctagagtgatccaaaggtttctttgaattcagttttgtgggttgagacgggcagccagactgtgagtccctcagctctgcttcaaccagaacagctccactttactgttcagcatgttagccctgtatgtaaggatgttttttagctttagctaaaatttagtgactctatgaccctaaggccctgcttccctgagattttgaaagctgaagcacattcggaaaactttttcttccttaaaaatcacctgaaatctgacaatctggaagactagttctgtctgctccagcccttggtcccttagatgtgcttttctgaagatccaaactcaacctgccagtcaatataccaactgagcagagcccctgttctccaccagatttcaagagaacatgttccattcctgttcagagcttcagagcagcttccgctaagattgcacattaatgcaacagcgtcctattttctttgtttctttttttttttttttttttttttttgatgagacaggg

SEQ ID NO: 202 - DNA, 895 bp, homo sapiens
atttttcctccttatgagatattgttccaaatagaacacagtttgtctagatgatttttgtcacttaaaattaggctccaggaaagattccaaatttcatgagcaattgggctcataaaacaagatcaaactccaatagtgtatatccaaagtatgtataatgtgtattcggtgtatattcttccaccactgcatggtgtagacagaatttctcttccaaggggcaccacatgacaaaaccgtacataataatgaaatgcatttgtagacaaaggactagctaaaataccaactgaaagtgggaagaccagaaactgaagtgtaagatgaggtaagccctggagtaagagtcaagaaatccactttctatccataatctgtctcggtttaatgttggtcaagtcattttttaaaaaaattctaggtcttggtttccttatgatgactttagatctctgttccttggaattctagagtgatccaaaggtttctttgaattcagttttgtgggttgagacgggcagccagactgtgagtccctcagctctgcttcaaccagaacagctccactttactgttcagcatgttagccctgtatgtaaggatgttttttagctttagctaaaatttagtgactctatgaccctaaggccctgcttccctgagattttgaaagctgaagcacattcggaaaactttttcttccttaaaaatcacctgaaatctgacaatctggaagactagttctgtctgctccagcccttggtcccttagatgtgcttttctgaagatccaaactcaacctgccagtcaatataccaactgagcagagcccctgttctccaccagatttcaagagaacatgttccattcctgttcagagcttcagagcagc

SEQ ID NO: 203 - DNA, 1002 bp, homo sapiens
ctctaaaatttcaccctctgttctgtacaccaagtacctcagcaagtaatccagttccagatgggatctgcagtctgccattaagtctttaccacacataggctcttatgctagagcccttaccatatggtccaaaatgccatttttaatgtgtatttgatatggagactctgttcacaatttgagtactaaagagagaataccacctcctagtagatacaccaggaccaatgtaatgctgtcattctaaggagagcagtggaacatctccaaagaacccatctgtagtcttccttcggcccttgatcttattcctattttatttttaaggtttttttttttttcttcgagactaaatctcactctatcacccaagctggagtgcagtggcatgatatcagttcattgcaacctctgcctcccggactcaagcgattctcctcactcagcatcccaagtatctgggactacaggcatacaccactatgcccagctagtgtagtgtgtgtgtgtgtgtgtgtgtgtgtgtgtgtgtgtgtgtgttagtagagacagggtttcaccatgttgcccagggtggtcttgaactccagagctcaggcgatccacctgccgaggcctcccaaagtgctgggattacaggcatgagccacagcgcctggccaatcttttagggataattttagaacagtatacagatattgagccaagagtcaaaagagctgggttgcaattctggttgtgccatttatcagttgtgtgaggtgggacaagtctctttttctccctagctttctctttcctcatttataaaataaagaaatgagaatgatagttgtattaatttctgaggactgccagaacaaattactacaaactgggtggcttaaaacaacaaacatttattctcacatagttcaggaggctagcagtttgaaatcaagttcttgacaaactcccctagagtctaaagtctctagagaaggattcctccttgcctct

SEQ ID NO: 204 - DNA, 971 bp, homo sapiens
gagcaagcactgcagccatcctcctttatttccctcaaggcaatatccaaggattaaaaagtcagagccgtctgcagattcctcctctctaccttgccctgcactttttgtgcccttcctcttccccctctccagccccaaacctctctcctgatccacggtactcctcctgggatgtccactggggctgatcctcccccattctccccctgagttccctgctgttaatctgtctccagcaaaattaacctagcctatgtcccatgccctctggactctggctgctcgtcaatcactcttaaaaatccggtttctccttaggcaatcattttgttttgattttatgtgtaaaaaaacctgagtaaattttttttttttttgagatggagtcttgctctgttgctcaggctagagtacagtggcatgatttctgctcactgcaacctccgcctcccgggttcaagcgattctcctgcctcagcctctctgagtagctgggactacaggtgcccaccaccatgcctggctaatttttgtatttttggtagagacagggtttcatcatactggccaggctggtctcaaactcctgaccttgtgatccacgcacttcggcctcccaaagtaatcactgctgggattacagaagtgagccaccgtgcctggccaaacctaagtaaatgttttaaaattatactactaacatagcatacaggctttagactgttggttgcttttaagtttgcttactttaaaagctagagagaagatggttgaggtgatcttgtctccttcagtattcactctgagccatgcctcctgaggaagtttgctttaggggaggcattgctatgttatacactctacgatgcaccagcccttgcctcagaaggcaaggtttgaaccccaacactgtcttttgcaaactgttaccttaggaaatagattttatctccttaactcacttttta

SEQ ID NO: 205 - DNA, 974 bp, homo sapiens
gttcaagcgattctcctgcctcagcctcttgagtagctgggactacaggtgcccaccaccatgcctggctaatttttgtatttttggtagagacagggtttcatcatactggccaggctggtctcaaactcctgaccttgtgatccacgcacttcggcctcccaaagtaatcactgctgggattacagaagtgagccaccgtgcctggccaaacctaagtaaatgttttaaaattatactactaacatagcatacaggctttagactgttggttgcttttaagtttgcttactttaaaagctagagagaagatggttgaggtgatcttgtctccttcagtattcactctgagccatgcctcctgaggaagtttgctttaggggaggcattgctatgttatacactctacgatgcaccagcccttgcctcagaaggcaaggtttgaaccccaacactgtcttttgcaaactgttaccttagagaaatagattttatctccttaactcactttttacatttgcaaaatgggtaaattgtgactacctcacatggatgtcatgagatgaaatgtaagaatgtgtgtccctggcatatagtaaccactttcgccaaagactgagttatccaactacagacagagaacagctggtggcctaatcaaagggagatacaaaataacaatgccaagactggaaaaggaagttcatcttaggatttccaagagaaaaagaaatatgactgtattataataggtatatttattaagctcttaccatgtgccaagcaaagttctttatatacatgatatacttcatatacattatttcatttagtcctcatggctaccaggtgagcaccattattttcccattttacagatgaggcacagagaagttaagccacttacctaggaagggcagtcctagttaagaagctgggattcaaatccaagaggctggattccagacctcagg

SEQ ID NO: 206 - DNA, 1002 bp, homo sapiens
ttataataggtatatttattaagctcttaccatgtgccaagcaaagttctttatatacatgatatacttcatatacattatttcatttagtcctcatggctaccaggtgagcaccattattttcccattttacagatgaggcacagagaagttaagccacttacctaggaagggcagtcctagttaagaagctgggattcaaatccaagaggctggattccagacctcaggctctattatgagaagtacctaaatagagattggtttaaccaaagcctgagtcccaactaagggcaagactgtgacacagaggtcactaatcagaatgaaagattgagccagagttgagttgttggaatgtattttggtacatttaggttgttttaagtatatcaatctccattccactcaatggttgagttcagtttcaagttttccaaatgctttatgggaaagtcatatttttctcccattgcagcagggatgccagcgcagccatgctttctcaaccaccaagtagaagcaaagccaaactgacccaagaagatgaacagagggaatccagggagttccaacttgggttcacagctgcaattctcaaaggatggactaagccatgtcacccctccagataacacagtcatattaatagtgaccttttggaggcctccctaaacagcaggtgaagtcccaaaatcattagattattcctggcctcaattgtggcccagagggagagccctaagatttttccatgggaacaaagatctaaattctgggactatctgggccatgtccaccctgcaccatttactacaaaatgggctgatcctatggaagcacactacctgtgttgtggtcatatagatcatcacctggcttctccagggctaaccagttagcatggaaatgggacacccaagaacaagaggatagaaagaagggaagggtggaaagaaggaaggaagaaagggtgggagggagggaagagtggtagttttg

SEQ ID NO: 207 - DNA, 915 bp, homo sapiens
tcctggcctcaattgtggcccagagggagagccctaagatttttccatgggaacaaagatctaaattctgggactatctgggccatgtccaccctgcaccatttactacaaaatgggctgatcctatggaagcacactacctgtgttgtggtcatatagatcatcacctggcttctccagggctaaccagttagcatggaaatgggacacccaagaacaagaggatagaaagaagggaagggtggaaagaaggaaggaagaaagggtgggagggagggaagagtggtagttttggaaggaaggagggaatcagagctaaagataatacatgatatgagtcagtgttcaatgtccctgaagattaggggaatcaagctttgcttccaggagaattaacacaggagagccaacagagatgtggaaatttaggaagtcagaggagacattctttcatctcattcattcgttcattcattcacttgctcatttttacatgaattgactctagaacagatgctggagatacaaagatgcatgagacttgcccccatcctcaacagtcattcacagtctaatcagaaagagagccttgcatttggaatacaatatggagtaataatacctctgtgttcagcctgcacaaaatactctgtatgcatggtcatatgtcccttgaaacaactttatgaggaagatactactatagtctccatttgacagataaggaaactgaggcttagggaggtcaaataacttgcccaagtaaaacaactagtaagtagctgaaccacaaaacagagattcatgcagaaagctgtacaacagaagaaaccaggactacatctgcctcaaaggaaccagagaaggcttccaaagaaggcagcattttaaatgggttttgaaggatgtatagca

SEQ ID NO: 208 - DNA, 864 bp, homo sapiens
cccagccctcaggcacatcagtgccctctctaggctctctctcaccaactttagaattgaattacatcagttgtttccagatggtgatctgcagaattcctttaaagaccacctgtgggatttgagggaggaaaactacactctcccaatctccctctttaacccaagcatctgattgctttcatctgttttacatacttagcttctgtgcacaacttcctttgattaaagagttccttgcctttatagtagtggatgatatctaaggatgatgtaaaatactgggtgttagctaaggttttaccaaacttaaagcctttatgcttcataattccactttattgatgtaggaagacaaatgatagacttactttcaaggtggatagaagggatgcgacctagccaaggctacagcatttctctagtggcaccactgccatgacaaccatcagtttgaatgccttatgggtgcatcctatgggttatgcactggccccaagccataacccctaggactctagagccagcagcaaacacaaaacactgaattaataatgagtgagatctctgttcccatagctgccacaggctaaataagttgagggggtattgtaaaacccaagatgagatcactgagcctctggtatcaaaaaggtgtatttcacagaatgtttagttggacgagagcttgaagagcatggaaacgatctggtatcattctggtcaaagaccagaatttagaccccagttctgccatttgctgactaatgactttgggcaaaatacttaactttcctgagagttagtttcctcatctataaagtggggtaatataacccaccttgcaggatactggtaggatta

SEQ ID NO: 209 - DNA, 946 bp, homo sapiens
agcagggtcccctgagcgttcctcctcagctcccaacacttccctccaggcaccagtatgcagggcaaggtcctggagggggcgccgaaacaccactcgagatcctcactctcaggaattcaatatagaaaacacattaagacctgtttacatggaactgctgtttataattattgttccctatgggatattccccactgcttcctccaatcctcttttaaactgctcaactaatagagttttcctggcttccccagggagacattcacagatgctaatagagacataattcaaaaattgcttgatatacatgccctcaattttccccaagaaccacctaagtaaagagccccagacatgcaacacattcattggccagatgcaatttaacatgcgtgggattaaatatacaggctactacagccaggttgtcatcaagcagcagcaggcatggcattttatcctaaggtaccaccatcggccaaatgcaacaggaaagaagcaggctgctgggtgggacccctggaagatcccctcctctgtaatttccactgcaagcttttcccaggccttttcaggcaaagcggggagttttgaaaataaatcccccaggcttggagaagcaaagaatcaatgctaagcagctccggaaataatagcttccatctctctgatatataaagaggataaggaaggcagaaagaaggggcatgatattatgagattgcaacaatacattgcaacattacattaaagaattacagaaagcaagatctagcttcagatgccagttcatgcacttactccctgtgtgaccctgggaatcacttaagctgtctgagacttagcttgtctaatgacaaactggggatactaatatcacctcccaggattgttgggaaggtaaatggagattgacaaatgtgaacacacttagtatgtcttt

SEQ ID NO: 210 - DNA, 877 bp, homo sapiens
tgtttacatggaactgctgtttataattattgttccctatgggatattccccactgcttcctccaatcctcttttaaactgctcaactaatagagttttcctggcttccccagggagacattcacagatgctaatagagacataattcaaaaattgcttgatatacatgccctcaattttccccaagaaccacctaagtaaagagccccagacatgcaacacattcattggccagatgcaatttaacatgcgtgggattaaatatacaggctactacagccaggttgtcatcaagcagcagcaggcatggcattttatcctaaggtaccaccacggccaaatgcaacaggaaagaagcaggctgctgggtgggacccctggaagatcccctcctctgtaatttccactgcaagcttttcccaggccttttctaggcaaagcggggagttttgaaaataaatcccccaggcttggagaagcaaagaatcaatgctaagcagctccggaaataatagcttccatctctctgatatataaagaggataaggaaggcagaaagaaggggcatgatattatgagattgcaacaatacattgcaacattacattaaagaattacagaaagcaagatctagcttcagatgccagttcatgcacttactccctgtgtgaccctgggaatcacttaagctgtctgagacttagcttgtctaatgacaaactggggatactaatatcacctcccaggattgttgggaaggtaaatggagattgacaaatgtgaacacacttagtatgtctttacatagtaggtattcaataaactcttctatatatcttctctttctgaaaatctgaatatggggagcatggatatg

SEQ ID NO: 211 - DNA, 914 bp, homo sapiens
gtccccaccactcctttttattgcagagggaattgacattcagggaatggaaatgcccagcccagaattggggatgtggtctgggaacccaggtctcccatcccactccctcgccctctcaccccctcccgctggtcagtgttctttgtcctctgctggcatccctggggacgggccagcccccatccccccgacacacacacattgtcccttcaagatggagccaggctgacaccacgtagaatgacctggaagcccccactcagtctaccagtcctccctcctcacacaggaatagatgggagggaaatgaaataagctgccatctgctgtgcatcctctgtgtgccatgctctgggtacccatctaatcctcgtgaagaccctgagaagtgagtgttcttcacagactaggcaacaccagaaggcaggatgaagaacgtacagaagctacagagtgcacaggtgacaggtatgagagccaagccattcaaactccctgggtataggacccagctcttcccacgtctctgcctttaccgaatcaaacacctgagcacggaagaccctccatcaacatgaactgctttgaattgacatgaacaagcttcaatcaaactataaatgctgaaatttttcaattatagaaagtatttgaaagatcccataaattcccctgtcatatcacgtgagctgcatttactgcagcagacactttttatctcgggcttggaggaaggattagcaagaagaaagtggagggggtctgaggaagggctggcagcctagaggaggacagcagcaagaagcaggctggaggcagttctgtgctgccggccttcatgggtgtggcctttggacagcaccttagcaggaatgtggtggagagcagccccattcactccagaggagagc

SEQ ID NO: 212 - DNA, 964 bp, homo sapiens
aagaccctgagaagtgagtgttcttcacagactaggcaacaccagaaggcaggtgaagaacgtacagaagctacagagtgcacaggtgacaggtatgagagccaagccattcaaactccctgggtataggacccagctcttcccacgtctctgcctttaccgaatcaaacacctgagcacggaagaccctccatcaacatgaactgctttgaattgacatgaacaagcttcaatcaaactataaatgctgaaatttttcaattatagaaagtatttgaaagatcccataaattcccctgtcatatcacgtgagctgcatttactgcagcagacactttttatctcgggcttggaggaaggattagcaagaagaaagtggagggggtctgaggaagggctggcagcctagaggaggacagcagcaagaagcaggctggaggcagttctgtgctgccggccttcatgggtgtggcctttggacagcagccttagcaggaatgtggtggagagcagccccattcactccagaggagagcctcaaactcttcaggcagatctagcctaggtagaatcttggcctggcccctccgggatgacaggtgccattgcccaagaatggggaaaaggctgaagtgctccagccaaagaccccaatttatcttcaggacaattttcactggaaaccttgcctcaccactgcccactttttcagaagtaattagaatgctaatctataagaaagatgactattaaaaataaattaataatagataatacattttggcttacaattttgaataatatagccatcccatcttaaagtaaaaattcatatatttttaataagcctgagacatgttttccaatgaaccacagatggttcatttttattatcctataaagagacattatgggcaagtgttttttaaaatggtaaaacagaaccttagagcagctctctttt

SEQ ID NO: 213 - DNA, 876 bp, homo sapiens
ggcaagtgttttttaaaatggtaaaacagaaccttagagcagctctcttttgaagatctctaagcactttctaagcatcaggacccccttctgtcatcacagagactgaaatgaggagatggtctctgtcaccccctcactcaccagtgagccccagaccttcatccctgatcagatggaagcagtgtggcatgattacagttcatatttcaactctgccactcaatgactaatagccaagcactaataatgcagaaaatgtaaatttaaaaaataatcttcctgagattggttatgaaatgcactcaacacagcaccatccacagagaggttctttttaattgctcttttctttcctctcgacacccagaatcacaaagcatgcctgaaagcgtcacacatatatgtctgtgaccataacatggcattgcacatgcaaaggaaataaagtaggtgttacccatgtgacaaaggtccatgagctctgtccgcaaaaagctgttgagtttaaagaacaaataattctgaaaaatcttccaggagatgaaatttgtagaactcaagggcagtaaactagctgctttccaaggacttgtcatagctttattgacttacaatagccaaagataagtcagtattaatcaaacccattctctagaaaaacctcatcatcactggggccagggcagagaagtgtgacacagctctctccagcttccccacttcacagcatggttccaccatccacccaattgctaaagcctggatagtcttccttgtcacctcccgatccccttctctaacacccatcccccggccacccaacatcagcaagtctggtggtttctctctgtcacagagattcaagatcttccc

SEQ ID NO: 214 - DNA, 910 bp, homo sapiens
tcgtagtgttcatagactctccttccttcctaacttaaaagaggctccttctggtttttccttcatacacttccctcactcttttccttcactgcactaaagatgatttctaattgcatagtcattgatgccagtatttgtttattgtgtcattcctgctgaacagaggatgggcctgacttatttgggaccatgttgctgatgcctggacctaagcctggcacagagtaggagctcaacaaatttgttaaatgagtggctgaatggccatactctcaaaggacccacagtctaggagagacagaagaatctttgtctttttgtcttgcagtgggatggaagctgcagggaggggtcttgtcacattgatactgtctggggaagacagaaaaacttcagtttcagaggaggtagcccttgaaacgaagatttgagagagggcagcacattgtacaactccatgggcaccatgcacattgtagtccagataaacagagccccttggagatatgtgaggcatgggatagactcagagaaacccaggaaataaccccttcaggcatctgacatgcaaagatgtggaagtgtcaaccaggaagtcatgttgggggaacagcaagtatttacagaaagtgactgtgtgtgtctgtgtaggagggtgactttgtataggagagataaaacctgtgagctaatcaaggagaagatcataaaagaccttcataaagagcatggcctttttcctgcaagcagtgaggagccattgaaggctttagcataaggacagtcagatgtacttccctagaatgcacatttccttctgctccagaacttctgcacaggaggctcctaaaagctctccccatcctccctgtacacgtagaatctgcctctgtctctctttctctct

SEQ ID NO: 215 - DNA, 877 bp, homo sapiens
cacttccctcactcttttccttcactgcactaaagatgatttctaattgcatagtcattgatgccagtatttgtttattgtgtcattcctgctgaacagaggatgggcctgacttatttgggaccatgttgctgatgcctggacctaagcctggcacagagtaggagctcaacaaatttgttaaatgagtggctgaatggccatactctcaaaggacccacagtctaggagagacagaagaatctttgtctttttgtcttgcagtgggatggaagctgcagggaggggtcttgtcacattgatactgtctggggaagacagaaaaacttcagtttcagaggaggtagcccttgaaacgagatttgagagagggcagcacattgtacaactccatgggcaccatgcacattgtagtccagataaacagagccccttggagagtatgtgaggcatgggatagactcagagaaacccaggaaataaccccttcaggcatctgacatgcaaagatgtggaagtgtcaaccaggaagtcatgttgggggaacagcaagtatttacagaaagtgactgtgtgtgtctgtgtaggagggtgactttgtataggagagataaaacctgtgagctaatcaaggagaagatcataaaagaccttcataaagagcatggcctttttcctgcaagcagtgaggagccattgaaggctttagcataaggacagtcagatgtacttccctagaatgcacatttccttctgctccagaacttctgcacaggaggctcctaaaagctctccccatcctccctgtacacgtagaatctgcctctgtctctctttctctctcctcctcctcctccatctcctcctcctcctcctc

SEQ ID NO: 216 - DNA, 902 bp, homo sapiens
gctccagaacttctgcacaggaggctcctaaaagctctccccatcctccctgtacacgtagaatctgcctctgtctctctttctctctcctcctcctcctccatctcctcctcctcctcctctccctctctctcgctgtctcacacacacatacacacacactccttccttcctatctagtcagattccactccttgggatttcaggcccaccgtcactcctcagggaagcctgccctgaatgcctgcactacaccagggcccctttcccctgcccccatcccagagcaccaaatagctttcccttgcagcacttctcacagctgtcattttatgtttgtgtctgtgattcttaggttaagtccctcatgcaccaaatcataagatctgggaacaaggaccacacctgtcctgcttcatcactgtaatcatcacactgcctgccaaagtgccttgcacatattagatacttagtagttatgtgttccatgaatgactctttaagagatcttctagctgttcttgcaaagaacccattggtaaggttgaacctacaggctgatactttgcactagtctcaggaagagatggtgagtacatgaaattgagtcccccagaggttaatgcccagtgccccagctaggaaacgtccaaggaggcaatttgaaccccatctgtctggctgcagagcctagccctctaatgcattcaggggtcctagctcctcgaggatgccactgtgccgtgaacttctttctgaccctcatggctcccagcacagcatccacactcagaagtgcaagatgaatgtttgcagataatgaacataaagctctcaggaaccctcatctcctgagaatctgctttggcccccacagcaggtctgggtgtggaccttcccca

SEQ ID NO: 217 - DNA, 1002 bp, homo sapiens
gtggcaaagttgggatcttaacccagttctatgtggctataaagttcatggaatagaatgctgcagttaagaacatgggctttggcatcaagcagacctgtatttgagccccacctctgctgtttattaactgtggccctgggcagatgaccttacatccttaagtctctagttctttgtctttaaaagggtggcagaatgtacctcactggttttaggaaggtcacatgagatagtgcacatgaagccctaggcatgggaaaattcttctaaaatgtcagctgccattctgatcactgcaagacccccacccccaatactcccaattgtaccaccccaccccactcaccagtgtctcagaaatgcctcctccagaaggaaggcatcctgtctaacccactgcttctagccaagctgtctttcttcagaaggtagaaaaagattgttagtcattgtttaatctttattgagtatataccgccacaccaattgcactgccacttcattatctcatttaaatctgacaagagccttgtaaagtagggattattcccaccatttcccagatgttgaaactgaaattgataaacacgacatgttgccatggctacatgaagatctccaagccggaggatctccaccctcacctgcctagcttcccagacctctctgcagaaaagggactgacccccaagacagccctggcctctgggctccaccccttccacatccatcccagggccgctgaggactgaagagttctccacgtttgccctttaaagtgacttaaaaataatctttatgaatttcttcatatacaaaatttgtacttactcattgcagcaaatttagaaaatacacataagcaaaaaagaacgtaacagccatccataaccctaactctcagagatcaccactattaaaatgtttattatctaagagagagatgatatagacaaagatgagacagattgacacagagaagatgggtacatgatagat

SEQ ID NO: 218 - DNA, 1002 bp, homo sapiens
tgctcaactgtaatcaaacattatttttaaaaaatcattccagcctgggaaacagtgagaaacccatctctacaaaataaaaaataaaaattagcttggcattgtggcatctgcccgtggtccctgctactcaggaggctgagatgaaaggatcacttgagcctgggaggttggggctgtggtaagccgtgattgccccattgcactccattctaggcaacagagtgagaccctgtctcaaaaaaaatattattcatttaatatctgttgccaccacaggactgatccctctgtgagggcagagattgttcatgcatggaattgtgatttataagcactggctctggagccaggttgcctgagcacggagccagctgtgccctgcgggacacctgtggcacacttcactcctgggacacctgggacacgcacacaatagaaatgttcacattttactaggcaatgccagtcacatagtcctacctaatttcaaaagggtaagaaggtacacccaacacgcatcaggaaggaggaggaccagaaattgttggtgacaagcacaaatgaccaccccaatataatattttgtttggaaggcattttattccacaaaaacaacattacaataaacacaacaacaaaacactggttgcagtagaaccaactttccagacctatctgcacagcacaaccattatcccactcaaaatgtcatgtttttacccaaaacattaaaattttaaaagcaattcaaacccatagcttaaaaaatgttccaaccagtaataaaaggaaaagtgtgcctcctcctcccaacttccctaccccacaatcgcaagatattatccttataggcgaaaagggtttcaggatttgagatgcaggctgggaggtctgagaagacttcctatagaagacatgacttcaaactctttcttgtatgtgagatttaattttcaaagactcctctgatccaacttaagctttatggtaaatcacctt

SEQ ID NO: 219 - DNA, 1002 bp, homo sapiens
atatgccagcgctctatctgcaggggttcttttgatagcagcagactgagagatgatgttactgtcccctttttcctgttgttggcaactgagactcagaggatggaagtgacttgctcaggtccaccacctcttcagctgtggagctgcgacaggagcctttgtttgacttcaaagctcaccatcactcctctctcactgatgctcaagtgggctatcacctcgcctttcctgagccttccttcgctatcctaaaacagcgcctcccgaaatcaccactaaagaacttattcatgtaaccaaacaccagcggttcccctaaaaacctatggaaataaaaattaaaaataaaaacagtgcctcccatgacccatgtctctccagtcccataactctgctctatttccattcacagctccatccccacctttatgtcttttgttcactgctttatccccagtgcctagaagagtgcttggcacctagtagacactcagtaacgtatttgtcgaatgagttaataaggttgtgaaaagaacgttagattactggaaggattcatctgagtttaattctgctatgctgggaatccagtgtgcggccttggatgaagccagttccctccctgggccccagtagccacatctgtacatttagagggcaggagaaaagccacacgctctgtgacttatacaacttgttgcccagagtggaggctgctttgatgctcagaaaaaagaaacaaacatggaaatgctaaatgggtggcagagagcttgagggaggaaggagatggggagggtactcttgaaactgtttggtgtcttccctcctgccccctcagtaccaattgtcaagtacagaaagtgaaggagacttgtattagtggaatttggtccctgacttgttatagagacacaattacaaagacacaagagtgggcccagcagagacccttagggtggtcccttgaggttccaaagcatctgcccatcaagcaga

SEQ ID NO: 220 - DNA, 1002 bp, homo sapiens
caccagcggttcccctaaaaacctatggaaataaaaattaaaaataaaaacagtgcctcccatgacccatgtctctccagtcccataactctgctctatttccattcacagctccatccccacctttatgtcttttgttcactgctttatccccagtgcctagaagagtgcttggcacctagtagacactcagtaagtatttgtcgaatgagttaataaggttgtgaaaagaacgttagattactggaaggattcatctgagtttaattctgctatgctgggaatccagtgtgcggccttggatgaagccagttccctccctgggccccagtagccacatctgtacatttagagggcaggagaaaagccacacgctctgtgacttatacaacttgttgcccagagtggaggctgctttgatgctcagaaaaaagaaacaaacatggaaatgctaaatgggtggcagagagcttgagggaggaaggagatggggagggtacctcttgaaactgtttggtgtcttccctcctgccccctcagtaccaattgtcaagtacagaaagtgaaggagacttgtattagtggaatttggtccctgacttgttatagagacacaattacaaagacacaagagtgggcccagcagagacccttagggtggtcccttgaggttccaaagcatctgcccatcaagcagatgatgtgattagtctctgtgaccccaaggatgcctcctgaaattgctgattcaatttctcctaataaaataggaacaataattagctaataagaaatcaacaattaaagctatgagagaattaagtgagatcatgtaagcaaagtacatgtcacagtgctctgcaaataggcagtgctcagaagtgtcaccttttctctttcttctctgagcctccgtcttctcttcggtaaaatgagaataatattatgcatacctcacaggggttaagcaatgtgaaagtactctgtaaagtataaggctga

SEQ ID NO: 221 - DNA, 1002 bp, homo sapiens
gagatgatcaacagtctttcatccagagggttgtgtttgctggtggccattacctttaacataaaacgatcatatttactttatcctattcatgtccaacctcaactgacaattgagttgtgtctctgacaataaatagcagaaaaaggaaatcttcctatactgaagagaaacacaattaattaactagatccatcaggaaaggtacaatcatgattgagacagtgtttaacagatgtgactattggattctgttgttgagaatgacccttaaaatcacagtcaaaatatacgacaagatggaaataacatttttgagcacctactatgcatgtagagcatcttacataccttatctcacttagatttacagctgcaaggtgggtatgattctagcttgaattagtctaataaccatatacctcctaggggcagtgagatgattagatcaattctaaaactattaccatgctctctgagctcaccaagacaggcagttaagtacaaggatacattaataccgaatccagcaaaagctcacatggccagcttccattatgttcctatttgtgattattctgtatcaagcacagaaatgtatgttcacacgaacaacaaagaaggggtttattagtgtggattacagggcctaagcctaccctctgaaactggttttggagtctttagcacgcttgtttgggacagttaaacatgtgccagctattctaaaacagtagcagtaatgtgatagagctgggtcataccgtgcttcccaaagtatgatcacttcatttcaacaacttcacactaacagcctgaactgggctgtgaagggaatatttagaccaaggaaactggaaaactgtatcaatcaggcttttccaccctccccaagagccagttgtcagatatctaccagcctaccaacgctagctctctaatcagaaaccatcacttagcaagttcccaaattatctgcagagcaatgaactcctcttcttc

SEQ ID NO: 222 - DNA, 1002 bp, homo sapiens
ctatgcatgtagagcatcttacataccttatctcacttagatttacagctgcaaggtgggtatgattctagcttgaattagtctaataaccatatacctcctaggggcagtgagatgattagatcaattctaaaactattaccatgctctctgagctcaccaagacaggcagttaatacaaggatacattaataccgaatccagcaaaagctcacatggccagcttccattatgttcctatttgtgattattctgtatcaagcacagaaatgtatgttcacacgaacaacaaagaaggggtttattagtgtggattacagggcctaagcctaccctctgaaactggttttggagtctttagcacgcttgtttgggacagttaaacatgtgccagctattctaaaacagtagcagtaatgtgatagagctgggtcataccgtgcttcccaaagtatgatcacttcatttcaacaacttcacactaacagcctgaactgggcctgtgaagggaatatttagaccaaggaaactggaaaactgtatcaatcaggcttttccaccctccccaagagccagttgtcagatatctaccagcctaccaacgctagctctctaatcagaaaccatcacttagcaagttcccaaattatctgcagagcaatgaactcctcttcttcagaaagcaggctgaaagatacactgttcacatcttagcctgacctggacccagtgagtttccatcagtgagaaaattctgtgctaacttgagataatactattcttgtggcaattttacttttcctttgagcgattccttcaacctctctctgccccttcatttttccgtcttaaaactaaaagtgccctttctccctggacactcctcatttgcaatgaattgtcatttcagctcctcagtcaagaggagtaatgaaatcccacccgtgttaatcctcttatatcccgcagaaatattgtagacccactcaccctaggcaacat

SEQ ID NO: 223 - DNA, 1002 bp, homo sapiens
agtaatgaaatcccacccgtgttaatcctcttatatcccgcagaaatattgtagacccactcaccctaggcaacatgccctctctcttcaacacaggtcatcaattgttcatttactggctatctccatgtactggaacttcagggtggtgtccagctgggttcaaaggagaaacagtgggaagtttctccactgccacctgaattagatgagaaagagttgtctactgaaatacactagctggtggcaggattgggacgtcatttgactaattgcctcctagagctgcagagactgctggaactacctaagtaaatcatcaaaaaaaaaaaaaaaaaaaatcatcccagggcactttttccagacaaaaaggtccacttaaaacatcctctagagatctgtgcctgaagctgagctgctgcaatgaaactgacatttctgccttgcagcctggccatgggcttagctggactaaaatgctgctgcagtggtgagggcacagtgagagtccctaatgtacatggccttgctccttgtcctgacacatcttttagggctgctgctttctctagtgctggaatctagataattcctttcccagccgtttgtttcttcaatcttggaaaatatctggatgaatgtaacactgtcacacacaaacagaattatgacttacgtcacattctatgtcgtgattttgtggacttttaataattgcattacatttgtgaccattaatttccaccatcgccctgctcctgagaatctgtaagggacatttgacactcctctccccacccacctcaacatttgtgctgacctgaaggtcacattaaaaacatacccatttggagagaaagatctgtctactgaaatacactaaatattgaagaatttccaagtcatttgatcttgaaaactccatctaatggaagcagaaacactcaaaggtttttttttttggactccctttttcaggacactttcaggactgaggtatat

SEQ ID NO: 224 - DNA, 978 bp, homo sapiens
tcagactttgaacaaacctcagaaggaactgtcaaggaggctccccacgggttcacgctcttctctcctcctgcacacagggaacagggccattctccttcctttactgggactacctgggcttcatccagggaatccccaggtggcaacaggagggtggtgaaaaccgctgcccgtcacctgtaaagtttcctgtgaatgtgtctacagcggccagcaccacaaggcatacaaagaaagggaagggagagctgatgtgagagcggcagcgtgggcactcctgtgaggttgccacagctgtagacaagttaaatcagtgcagttcaatcaaaagtcatgacccatgagcgtcacaaccagcacgagtctacaaaggaatacattaaaactaagaccagagcacagctcacattagtgagggatgggatcatttcatggagtttttgtttcaaaatatttcattaacatttcacttatatacatgtgtgtatactgggttgtgatattaaattacaattcttactataaaatacagcaaaagaaagaagaaacaaagagagggccactggtttacctaacatccacaggcaggctacttcccagcatcttgagccccaaagaagtaaatttccttccacaaccgatgttaccacagcctgacacttagccaatgatgaaaacgaaaaacaaaacaaaagcttggcagtcagtatccaaatatgcagatactacagaatctgtttgatgtagaagttgatcctgctacccagacagcaaacaactcatttattaataaagtccagttcctccttaatgaagtgggtttaatagttgatatctcaataattacttagtgcattttttatgaaggtgatgggaaacaagtgctgtttcttgagtcggaaagagtctctcaagctcccacaaagaaatttcccgagcttgtgaggaattcagtcacaggaagatcaaggaatt

SEQ ID NO: 225 - DNA, 2002 bp, homo sapiens
gatctaatgctaggagattcaaaccaacaattaatttctctgttaaaatgggttaaaatagatgtaaaatattaatatgtatataagcattctgaattagacttatgtgaatttttctccttttctttctttctttttgagaataagccctttcatttacgtagaaatgcttcagcgtttagataattgctacttatcttgttagctacaaacacaaccataattaaaggctctgtaagaattatgaattctggggaaattggccacttgtctctgtggcgtaaacagtatctaatttataacaaatcatctgccttagtcccagcaggataaggtgatatgtattgcccagcacatgagaaagatggcaattaggaattgttaccaagttacgggagcctcacacgaacatccatcacctttggggatatgtacaagatacaaacttaatttgatggattccttttgtattgggatcaaagtctcaaaagggaaagtgacaatttcagggaaaatctggtgcaatgagaccaacactgatgagagaaatgcacacaatttaatacacctgctcacctgatgtggcaactcagcctgtgcttgctgtgggttgccacaggatgagacatggtctgtgcatattcccagcagccacccatctcatcactattcttgccagcccagatttacagttgttcaatagatggatttggtaatatctgcatgacaacaacaggcagagaaggttagatggcaattgattcttgattggtgtaagtttatagaacacattctggcagggcccaaaggaaatcactcacctacccctctgtgatggtaaaacgttgaaaattccacggacttggaccttgtgatccttcagtggaagatgggcagattccttgctttaattgacagacactttctaaataactaatgcaatcttatattacattatagtccataagggagacatacttaaactactacttacaacaacgtgtttttagagcctttcaaatggtttgtacaaagtagctcccatttaagatattttcctagtatttaaggctatctagtagacattacaaaacaatacgctgtaaatacattcagatttttatcagtaatacttaacatgccgtaatttgaactttctgctaaatcatgctatccattcctagttggccccaatggtgagagtttactgtttctttaaataattttgtttccctttgctgtctagaggtgtttatcattctgcttacttgcctgtgtctctggaatattcagaaggttccatgggaaacaatttgaatatgcaaagaagttatttttaaagcaaggaaaatgttttcatatggatttattttgagcacttctgcctttgcctccactgggaacatgtttctctccaacgccgaagccccctccctgtgtggtgtttgacgcagaggctgacagggcagggaagtggggttcaagataggaaggccattggcagtgtgaccccagcccacagtcctagatcccaggtcgtgacaccactcttttgacagcccagattgttacctaacaagaatgactcccaagctcaaccattccaatgccatctcctctggttccagataagattgaagatgagctggagatgaccatggtttgccatcggcccgagggactggagcagctcgaggcccagaccaacttcaccaagagggagctgcaggtcctttatcgaggcttcaaaaatgtaagacccgtgcacgctctgaaggcctggggggggttcccacgtgaggctacactctccccaatgccaagggagctcataaggcgtttcccatatgtgaggctgtacaaggaaggccagctctataaagggggcatgagagggagatcacctggctagaaaggaaggctccaggcgaggatggagcaacctcaggagacagtaaacggccaactgcccagaaatttcacagggtggcacatcctcaag

SEQ ID NO: 226 - DNA, 1002 bp, homo sapiens
gatttttatcagtaatacttaacatgccgtaatttgaactttctgctaaatcatgctatccattcctagttggccccaatggtgagagtttactgtttctttaaataattttgtttccctttgctgtctagaggtgtttatcattctgcttacttgcctgtgtctctggaatattcagaaggttccatgggaaacaatttgaatatgcaaagaagttatttttaaagcaaggaaaatgttttcatatggatttattttgagcacttctgcctttgcctccactgggaacatgtttctctccaacgccgaagccccctccctgtgtggtgtttgacgcagaggctgacagggcagggaagtggggttcaagataggaaggccattggcagtgtgaccccagcccacagtcctagatcccaggtcgtgacaccactcttttgacagcccagattgttacctaacaagaatgactcccaagctcaaccattccaatgccatctctctctggttccagataagattgaagatgagctggagatgaccatggtttgccatcggcccgagggactggagcagctcgaggcccagaccaacttcaccaagagggagctgcaggtcctttatcgaggcttcaaaaatgtaagacccgtgcacgctctgaaggcctggggggggttcccacgtgaggctacactctccccaatgccaagggagctcataaggcgtttcccatatgtgaggctgtacaaggaaggccagctctataaagggggcatgagagggagatcacctggctagaaaggaaggctccaggcgaggatggagcaacctcaggagacagtaaacggccaactgcccagaaatttcacagggtggcacatcctcaaggaattcaccctggcccagggtcaagccttagcccttaacataatcataccttccaacctggtggtgcccccacaataatgggatttggccctgctgacttatgctaaccaggct

SEQ ID NO: 227 - DNA, 2002 bp, homo sapiens
ggcagggcccaaaggaaatcactcacctacccctctgtgatggtaaaacgttgaaaattccacggacttggaccttgtgatccttcagtggaagatgggcagattccttgctttaattgacagacactttctaaataactaatgcaatcttatattacattatagtccataagggagacatacttaaactactacttacaacaactgtttttagagcctttcaaatggtttgtacaaagtagctcccatttaagatattttcctagtatttaaggctatctagtagacattacaaaacaatacgctgtaaatacattcagatttttatcagtaatacttaacatgccgtaatttgaactttctgctaaatcatgctatccattcctagttggccccaatggtgagagtttactgtttctttaaataattttgtttccctttgctgtctagaggtgtttatcattctgcttacttgcctgtgtctctggaatattcagaaggttccatgggaaacaatttgaatatgcaaagaagttatttttaaagcaaggaaaatgttttcatatggatttattttgagcacttctgcctttgcctccactgggaacatgtttctctccaacgccgaagccccctccctgtgtggtgtttgacgcagaggctgacagggcagggaagtggggttcaagataggaaggccattggcagtgtgaccccagcccacagtcctagatcccaggtcgtgacaccactcttttgacagcccagattgttacctaacaagaatgactcccaagctcaaccattccaatgccatctcctctggttccagataagattgaagatgagctggagatgaccatggtttgccatcggcccgagggactggagcagctcgaggcccagaccaacttcaccaagagggagctgcaggtcctttatcgaggcttcaaaaatgtaagacccgtgcacgctctgaaggcctggggggggttcccacagtgaggctacactctccccaatgccaagggagctcataaggcgtttcccatatgtgaggctgtacaaggaaggccagctctataaagggggcatgagagggagatcacctggctagaaaggaaggctccaggcgaggatggagcaacctcaggagacagtaaacggccaactgcccagaaatttcacagggtggcacatcctcaaggaattcaccctggcccagggtcaagccttagcccttaacataatcataccttccaacctggtggtgcccccacaataatgggatttggccctgctgacttatgctaaccaggctcaccgagactgatgtgtaagccgaatgtcggtgtattaatttaccttgggaaatggaactgacagtggaaacagacactcctctcccttcgctgggacccgctctccttggaagccacatggaagccaggttacaatcaaaagtggagtcagaggacgggagttccttgtttagttgttactttaaatacattaatgtgttcctgcagtctcaggccagtttgagagctctcagatacaatcctggatattaatttattttttaagtttaactctcagagtgcaatcttattcccaaatcctggagtggtgtggagtggggtgggctacagcgacatgcacctggtcaccctccctccaggtgcagtctgtaggtagagctgagctgggtcagttccaaactgaccacagcctcaatgttctccaaactgctgacccacagggattccagcccctcctgggagttatctgacaggtgctgggatgcctcttccttccacactagccttgactgcacatgccaagtgcccagtttcctaccattagggcttctttccttcgatggcagcattagcagtgggcagccgagttggagaaggatcctgtgggaaagttttccaggcaggcactgggctcagagggaacagcatccagaaaagagaagaaatctacactgcttggc

SEQ ID NO: 228 - DNA, 1002 bp, homo sapiens
aatttaccttgggaaatggaactgacagtggaaacagacactcctctcccttcgctgggacccgctctccttggaagccacatggaagccaggttacaatcaaaagtggagtcagaggacgggagttccttgtttagttgttactttaaatacattaatgtgttcctgcagtctcaggccagtttgagagctctcagatacaatcctggatattaatttattttttaagtttaactctcagagtgcaatcttattcccaaatcctggagtggtgtggagtggggtgggctacagcgacatgcacctggtcaccctccctccaggtgcagtctgtaggtagagctgagctgggtcagttccaaactgaccacagcctcaatgttctccaaactgctgacccacagggattccagcccctcctgggagttatctgacaggtgctgggatgcctcttccttccacactagccttgactgcacatgccaagtgcccagtttcctagccattagggcttctttccttcgatggcagcattagcagtgggcagccgagttggagaaggatcctgtgggaaagttttccaggcaggcactgggctcagagggaacagcatccagaaaagagaagaaatctacactgcttggcatctaccatggactcaataccacctaacataggttcataagatacccttggggaagttattgttacccccattttacaggtaaggatattgaggatcagagactggcttggccaaagtcacaaagcttagtattggctgagccaggatttaaacccaggtttttctgatcttaaagccccaaatctctccacctcacagtgcccattctctgacaatgtctcatcattttgcaaagcagctccagtcctgagatggcactacttgggagaagtggaaatgcacaggtccctgtccctggggatcatgaggaaccccagacaccaaggctgggcccagtcttctcctagtgctggccc

SEQ ID NO: 229 - DNA, 2002 bp, homo sapiens
ggctcaccgagactgatgtgtaagccgaatgtcggtgtattaatttaccttgggaaatggaactgacagtggaaacagacactcctctcccttcgctgggacccgctctccttggaagccacatggaagccaggttacaatcaaaagtggagtcagaggacgggagttccttgtttagttgttactttaaatacattaatgtgttcctgcagtctcaggccagtttgagagctctcagatacaatcctggatattaatttattttttaagtttaactctcagagtgcaatcttattcccaaatcctggagtggtgtggagtggggtgggctacagcgacatgcacctggtcaccctccctccaggtgcagtctgtaggtagagctgagctgggtcagttccaaactgaccacagcctcaatgttctccaaactgctgacccacagggattccagcccctcctgggagttatctgacaggtgctgggatgcctcttccttccacactagccttgactgcacatgccaagtgcccagtttcctaccattagggcttctttccttcgatggcagcattagcagtgggcagccgagttggagaaggatcctgtgggaaagttttccaggcaggcactgggctcagagggaacagcatccagaaaagagaagaaatctacactgcttggcatctaccatggactcaataccacctaacataggttcataagatacccttggggaagttattgttacccccattttacaggtaaggatattgaggatcagagactggcttggccaaagtcacaaagcttagtattggctgagccaggatttaaacccaggtttttctgatcttaaagccccaaatctctccacctcacagtgcccattctctgacaatgtctcatcattttgcaaagcagctccagtcctgagatggcactacttgggagaagtggaaatgcacaggtccctgtccctggggatcatgaggaacccctagacaccaaggctgggcccagtcttctcctagtgctggccctcaaatgcctcccgctgactctctccccttcccacaggagtgccccagtggtgtggtcaacgaagacacattcaagcagatctatgctcagtttttccctcatggaggtgagtctgaccttgaaatctatcttgcccagctccctctctggtaagcagccttcccttcctccaagtcctctcttccttgccatttgcttccttctcgaggaagagacaaactcagggcaggacacctccctcatcgtgagaggtgggagtctccaaagctttagcaggaaagaactctgaaaatgaacccaccctggaaggggaagaagggctgataatgcaacatcacaacgtctcagaacagctctagaaagcaggtattataatcccagatggagtaactgagtttcggggaagataagcagtgtactcaagattgcacagctggtgagtagcaaaccaggattagattccataagggtctgaaacaggttttgccatgctggcaccaccattgtgcagggcacttttgaatcttttccttaaaatagctgagacaagctggaattttgtaaaagaacttcagtaaataccgaagactataaaaataaactaattgaaaaagaggcaggaaacataaagttgtgcttattaagccagtttacaagtgtgccaggcccacaacagctgctctgttgccctgcccgactcctgtgggaaccagctgtgtccccatgggcctgggaccacatcggtgactcctcctgtggcctccatgtgtcacatgccactttgcatcctgtcaccaagagctgtctcctgcaagacatcttccctggatcctgacaaaatgcaaatccaagtattccaaacacttcttgggccctgtttctcatgggcctttttggcagcagacagatgccttccttggtgtgtggggcccctacccagatcaggtgggggaggcag

SEQ ID NO: 230 - DNA, 1002 bp, homo sapiens
cctctggttctgcatcacctccccctctaaatctcaaggcattgggggaaggtctggaccatcaaaagctctcagtcagaccaaagacatgtttatccatttgtaagcatttcctaaagatggggaaaagcagcagcaactttccctggcctgcaggaactcagggactcaggggactaataacaacagtgtatgagcttccgggcacactgcttcccagtggcagcccctgtacttagggctttgtatgtattaattcatttactccaattcccacaataaccctatagggtagggttttattattgattacctttttacagaagaggagagtaaggcaaagagagatagagtagttttcccaaggtcaaagagcacataaatgataaaggatggatttgaatgtaggcagaatgaccctcaatacagactgttcctacagtccacgtcctcagccactagaccatacggccactgggatgatagacagaccactgcagcgcatggataaggcaaaaacagggctggctgtgttgatctgtgtctctcagagctccattcttcctcaagggggcaccttgcaaaaaaaaacaaaaaaatggggcagggtagggaactgaaggcaggagctcttcacagagcatagccacatcctccaggcagacaagaggacgcaggaggcaccattctgtgagagtatcacagtctgacccaaagacacagcttcacactgtctgatggcttgatggttaatgtcactctgccttttccccttctcaggactttgtaaccgctctgtcgattttattgagaggaactgtccacgagaaactaaggtggacatttaatttgtatgacatcaacaaggacggatacataaacaaagaggtaagtgagctggggccaggggtgtgagagggctccagtgaaggtaactaacccaacagaaaacagccccaggcatgaggatagcactgtctgaatgaggcaggctctgctttg

SEQ ID NO: 231 - DNA, 2002 bp, homo sapiens
tgtgccattcatacaccaacgactccatgcatagacaggcaggagaatggttttctcatgatggctagagggaggggcaagggctcatctcactttttgctagatctaacttcacacccaaacccaaagagttgagtcaatgggccccactccataattttctcctttccatcaccctagcatcactctcctctctttcttgtcgaagccctgccttgtttggaaggttctccctgtgtggaattcctgcccccatcacctgccctccttttctgccttgtagatgccagcacgtatgcccattacctcttcaatgccttcgacaccactcagacaggctccgtgaagttcgaggtacgctcatctggggtccactctaggggtcctctggttctgcatcacctccccctctaaatctcaaggcattgggggaaggtctggaccatcaaaagctctcagtcagaccaaagacatgtttatccatttgtaagcatttcctaaagatggggaaaagcagcagcaactttccctggcctgcaggaactcagggactcaggggactaataacaacagtgtatgagcttccgggcacactgcttcccagtggcagcccctgtacttagggctttgtatgtattaattcatttactccaattcccacaataaccctatagggtagggttttattattgattacctttttacagaagaggagagtaaggcaaagagagatagagtagttttcccaaggtcaaagagcacataaatgataaaggatggatttgaatgtaggcagaatgaccctcaatacagactgttcctacagtccacgtcctcagccactagaccatacggccactgggatgatagacagaccactgcagccatggataaggcaaaaacagggctggctgtgttgatctgtgtctctcagagctccattcttcctcaagggggcaccttgcaaaaaaaaacaaaaaaatggggcagggtagggaacctgaaggcaggagctcttcacagagcatagccacatcctccaggcagacaagaggacgcaggaggcaccattctgtgagagtatcacagtctgacccaaagacacagcttcacactgtctgatggcttgatggttaatgtcactctgccttttccccttctcaggactttgtaaccgctctgtcgattttattgagaggaactgtccacgagaaactaaggtggacatttaatttgtatgacatcaacaaggacggatacataaacaaagaggtaagtgagctggggccaggggtgtgagagggctccagtgaaggtaactaacccaacagaaaacagccccaggcatgaggatagcactgtctgaatgaggcaggctctgctttggggctaacagagctggtccctggcaaaataaagaaggcctccctcattgccctaccctgccctgttcccaagcgcccagaaaggattaaacagattcattctcactgggtcacctagattcagtagatattacacagtggataaaaatgacttgtttcagtgtgaagagttactcttccctagggaacctgcatttgggaaggttaggagccacaagtcaaagctaaaagttgaaatggtggaattgtaggcagcacctagaatagaaaagaaagatttttaaggaagaggaacctacaattgggtcatattggccttaaactattttgcctattaatacaaccgccaagggggtaatggaaggtacagctgtctttacagaaattatcacaaataatttctgaatcttcactgctttgcacttttagaacctcagaggacatgtctctagccagtgaaataccctcaggtctatctcaaaactcactttggtatccactgtatcctggtatctcagtggaagctggaaattggcatcctgtaacactccacttgctgagctcctgtgtgccaggcacggtgcctggaggtatagatatcagcaccaatcttcacc

SEQ ID NO: 232 - DNA, 1002 bp, homo sapiens; identical to SEQ ID NO: 136

SEQ ID NO: 233 - DNA, 2002 bp, homo sapiens
atttcttaaagtagataaatttgactttatcaaagttaaaaattttgtgctttagaagacacctttaagaaaatggaaatgcaagccatggacttggaaaaaatgtttgcaaattatataccagatatataaagataccaggataccaaaccaatataaagactggcatccaaaatatataagggacatttataatttaatacaaagataaacaacttcatataaaataggcaaaagatttgatgagatatttaagaaaagaagatatatgaatggccagtaaacccatgaaaggttgctctatatcactggtcttcaaagaaatgcaaattataactataatgaaatacaattgcacagaatggccacaattaaaaagactgataataccaagcattggcaaagatgtggagcaatagaaactctcatagatagctggcagaaatgtaaatggtacaaacacgttgggaaacattttggcatctttgataaagctcagcacacacttaacatacaacccagaaatcccattccagtcaggcatggtggcttacgcctataatcccagtactttgggaggctgaggcaggcggatcacttgagctcaggtgttcaagaccagactgggcaacatggcgagacactgtctctactaaaaatacaaaaaaaaaaaaaaaaaaagccagacatggtggtaagcacctgtggtcccagctactagggaggctgaggtgggagaattgcttaaccctggggagtggaggttgcagtgagctgagattgcaccactgcactccagcctgggtgacagagcaagaccctgtctcaaaaaaagaaaaaaagaagaagaaaagaagtcccactcctggatatttacccccaaaagaaaaatatgtaattccataaagacttgtacaaagatgttcatagcagctttattcatagtaatctcaaaacttaaatgacccaaatgtctgtcaacaggacaatgggtaaatacattcatagtctgttcatccaatggaatattactcagcagtaaaaaggaatgttatagttgcatgcagcaatgtgtatgaagctcataaacctcatgctgagtaaatgaagccagacgcaaatgagtttacactgttttactccatttacatgagattttagaaaatacaaactaatctatagtaacagaaattagatctgtggttgcctggtgtcaaagcttgagaggcactcactgcgaagaagtgtgaagggatgtcttttggttgtgaaaatgttctatatcttgagtgtggtggaggttacatgggtggatacatttgtcaacattcatcaaacagtacacttaaaatgggtgaatttgttataagtaaattatgctccaataaatttgatttatttgttgaaaaacttggtgtaagggggaagtgcctaaccaatagaagacactcaaaaaatgtgttgaaggaaaaaaatcctgtgaaataaagcaggtaagagaaaataagaactcaatatcatccaaaatatagattacaaatcctaaatgagataataggaaattaatcccagtgctctgtttaaaggctcatacctgtaatcccaacactttgggagactgaggcaggaggatgggttgagcccaggagttcaagaccagcctggtcaacatagggagagcctgtctcttcaaaacaaaaatttaaaaattacctgggtgtagtggcacgtgcctgtgctcccagctactccagaggctgaggcaggaggatagcttgagcccaggagttcaagcctgccctgagccataatcactgcaccacactccagcctgggcaacagaacaagacccttcctcaaaaaagcaataaaataaaataaagaaatgcacatgactaacatagggtttattccaggaatgcaggaatagcccagtagcagagaaagcctattaaataatttatcacattaatatatcaaaagatcaaaccatttgatgcta

SEQ ID NO: 234 - DNA, 2002 bp, homo sapiens
tttactccatttacatgagattttagaaaatacaaactaatctatagtaacagaaattagatctgtggttgcctggtgtcaaagcttgagaggcactcactgcgaagaagtgtgaagggatgtcttttggttgtgaaaatgttctatatcttgagtgtggtggaggttacatgggtggatacatttgtcaacattcatcaaacagtacacttaaaatgggtgaatttgttataagtaaattatgctccaataaatttgatttatttgttgaaaaacttggtgtaagggggaagtgcctaaccaatagaagacactcaaaaaatgtgttgaaggaaaaaaatcctgtgaaataaagcaggtaagagaaaataagaactcaatatcatccaaaatatagattacaaatcctaaatgagataataggaaattaatcccagtgctctgtttaaaggctcatacctgtaatcccaacactttgggagactgaggcaggaggatgggttgagcccaggagttcaagaccagcctggtcaacatagggagagcctgtctcttcaaaacaaaaatttaaaaattacctgggtgtagtggcacgtgcctgtgctcccagctactccagaggctgaggcaggaggatagcttgagcccaggagttcaagcctgccctgagccataatcactgcaccacactccagcctgggcaacagaacaagacccttcctcaaaaaagcaataaaataaaataaagaaatgcacatgactaacatagggtttattccaggaatgcaggaatagcccagtagcagagaaagcctattaaataatttatcacattaatatatcaaaagatcaaaccatttgatgctaaaatcacatttgatataatttaccatttattcataataattttcaggattcaattaattaggaataaaatacttcttcagcataatagaaaataccccagcctggtacacagcttcatactttatggtaacacagcggagattctcactgaagaaaagatgaggcaagaaaagatgatgaagaaaagatgaggcaagaaaagatgatgtctgcacactgtcagacatcaccactgtttaacatttcctgaaagctcttcaaacacagtgaaacagaaaaggaaatgcgatctaaataggaaaaattacaacattccttgttaatgacatgattttctatctgagaaaaaagacagcaagaaaatcaacttaaaacaactagaacttttaaaaagctggcaaagtgactggtaataaaatacatatgcaaaaagaaattgtgtagccaatatatcagttgtgactagctagaaaattgtaatacaaatattctcattgtgatcacaataaaatttaaagcacatgggcatttttaaatatccataatttagatgaagagaaagaaaattttgataagtagagaaacataccatcttctgaaaggatgtatattataaagatagcaatattataatgacagcaattcttctctaattaaatttattttattttgaatcaaaatggaagtgttatttgggaaggaaatttggcacaattgttataaagttacattggaagattaatcagatgaaaatagcaaagataattttcaaaaagaagaaaaatggtgggatttgttctaccagatactgaaatatattataaagctgaaactattaaaatattataatatcagagaaggaacaggtagatcaatggaacaaaatagaaatcccaggtacaaataccatcttggttcataataaagggagcatattgaatagagaggtaatgaatcattaaatgattcttggaaaactggttaactattttggcaataagtaagtaaatattcttactcggtaccataaacacaaaatcactatagatatgtacagttgctttttaactaaaaaagaactaaaaatcatatgtgaatatctgatcaaagaatggaaaaagcataaaatcaaagt

SEQ ID NO: 235 - DNA, 1002 bp, homo sapiens
gcctgtagtcccagctacttgagaggctgaggcgggaggatcacttgaacccgggaggtcgaggctgcagtgacggggattgtgccactgcactccagcctgggtgacagagcaagaacctgtctcaaaaaaaaaaaaaaagaaaaaagaaaaaaagaatgagaaactcatacagattagaagagactaaggagacacaacaaataaatgcaatgtagaatcattgaagggaaaaaaatattagttgaaaagctgagatcccgccactgcactccagcctgggccacagagcgagactccgtctcaaaaaaaaaaaaaaaaaaaaaaaaaaaaaagaaaagctgataaaatttgaataagccctgtagtttagttaataatagtgaagccatgttaatttcctgggtttggtcattgtgctctggttatgcaagttgttaacattagaggagactgagtgaaaggtatgcatgaactctctgtactaattttgtaaatttctctgtaagtctaaaattattcataatatgcaaaaattaaacaaaaaataaaataaaataagcacatggaatgagactgtcccctgggtctctgtagaaaccaggtcaaacatcccaaatgctcttttacccccattctgagttgggccagaatggtcagaataatggttcccaatgtaccttgataaacacggaaactctcaggaccgagtcctaaggttctctgattcaataggtttggagtggacttgagaactgatctttttaataagggcctcagtctgtggaactattggcctcatgtgccctgtggataatcttggctgttggttcatttttcttaactgaaaacagtggcagaaactatggggatttttaaatctctaggctagaacattaactttttaaaaattcagaatagtattttatttgcctcaagcctgtgaatggggatcccacaaatcaccccccactgaagacaatgcccataacaaggtaacct

SEQ ID NO: 236 - DNA, 2002 bp, homo sapiens
ttatgcaagttgttaacattagaggagactgagtgaaaggtatgcatgaactctctgtactaattttgtaaattttctgtaagtctaaaattattcataatatgcaaaaattaaacaaaaaataaaataaaataagcacatggaatgagactgtcccctgggtctctgtagaaaccaggtcaaacatcccaaatgctcttttacccccattctgagttgggccagaatggtcagaataatggttcccaatgtaccttgataaacacggaaactctcaggaccgagtcctaaggttctctgattcaataggtttggagtggacttgagaactgatctttttaataagggcctcagtctgtggaactattggcctcatgtgccctgtggataatcttggctgttggttcatttttcttaactgaaaacagtggcagaaactatggggatttttaaatctctaggctagaacattaactttttaaaaattcagaatagtattttatttgcctcaagcctgtgaatggggatcccacaaatcaccccccactgaagacaatgcccataacaaggtaacctacccatgagcttctgagggatttaggaattgtctaccatctcctctctaagaagggctcccacaatatatccccttctgcttgcttctaactccctatcacctgctaaagaaggacctcaccttttaatcactttcattgccaaggggcacaaggagccccaaactctgtcacctaggaagagcttgacctcatggtttccacactgtgtgcttttatgtccctgctccaggagatgatggacattgtcaaagccatctatgacatgatggggaaatacacatatcctgtgctcaaagaggacactccaaggcagcatgtggacgtcttcttccaggtaagtgcacacaccctgcacatgagctgtaagcccagcctagatcaagtcaacccacgagcatctgagcaaatgatttgtgtccaacctctgtactaagcatggttggtaacagaaaagaattataagatacattgtcctcaagaaacagatgatctccttaagctgcaagtgtacatgacagaagagaacaagaaagtatattattaaacgctagtggtatagtatgaactctaaatccataaaaatttggggatcagggtaaacacgaaagacttcattaattacaactgtggaggtgttaagcatttgtgtctgggaagtaaggggaaataagattggaaactaggatagggccagattatgagacctttaaatggaagagtttggccttgctctggtacaggatgggcagctagtgctgatccttgactaagggagtggtataatcattggggcattttaggaaaaaattaatctagcggtggagtatcagagaatatcaagagttcactctagttcaacctcccactttgcagatgggaaaagagagtcctctctggccttgtgcaagtttgtacagcaagtaacaggccagaatcagaacctcttttgcccagtgttctgccagatggacagggtagcagggagtctacagaagaagcagaataagccagcagtgaggtgatgagtgtccagagcaagtcttttgatttaaggaagctcatggggctcaaagtgttgtaatcaggacctaattggagttgtctggccagtgaaagacaactctcattctcagggcaaagttggttaatgaaatgaatgaaatgagctccagctcgttactctgagctccagcaagaaagcaggggagtaagctttggaatggagatcaccagattctgtaaagtgctttctgttatgtctttcagaaaatggacaaaaataaagatggcatcgtaactttagatgaatttcttgaatcatgtcaggaggtaaggagagatctcagggcacaataactctacatctgggaaaggaaacctggggcctggggacctgcagaaggaaggtgatgagaaacctgcac

SEQ ID NO: 237 - DNA, 1002 bp, homo sapiens
tctaactccctatcacctgctaaagaaggacctcaccttttaatcactttcattgccaaggggcacaaggagccccaaactctgtcacctaggaagagcttgacctcatggtttccacactgtgtgcttttatgtccctgctccaggagatgatggacattgtcaaagccatctatgacatgatggggaaatacacatatcctgtgctcaaagaggacactccaaggcagcatgtggacgtcttcttccaggtaagtgcacacaccctgcacatgagctgtaagcccagcctagatcaagtcaacccacgagcatctgagcaaatgatttgtgtccaaccctgtactaagcatggttggtaacagaaaagaattataagatacattgtcctcaagaaacagatgatctccttaagctgcaagtgtacatgacagaagagaacaagaaagtatattattaaacgctagtggtatagtatgaactctaaatccataaaaattctggggatcagggtaaacacgaaagacttcattaattacaactgtggaggtgttaagcatttgtgtctgggaagtaaggggaaataagattggaaactaggatagggccagattatgagacctttaaatggaagagtttggccttgctctggtacaggatgggcagctagtgctgatccttgactaagggagtggtataatcattggggcattttaggaaaaaattaatctagcggtggagtatcagagaatatcaagagttcactctagttcaacctcccactttgcagatgggaaaagagagtcctctctggccttgtgcaagtttgtacagcaagtaacaggccagaatcagaacctcttttgcccagtgttctgccagatggacagggtagcagggagtctacagaagaagcagaataagccagcagtgaggtgatgagtgtccagagcaagtcttttgatttaaggaagctcatggggctcaaagtgttgtaatcag

SEQ ID NO: 238 - DNA, 2002 bp, homo sapiens
ggaagagcttgacctcatggtttccacactgtgtgcttttatgtccctgctccaggagatgatggacattgtcaaagccatctatgacatgatggggaaatacacatatcctgtgctcaaagaggacactccaaggcagcatgtggacgtcttcttccaggtaagtgcacacaccctgcacatgagctgtaagcccagcctagatcaagtcaacccacgagcatctgagcaaatgatttgtgtccaaccctgtactaagcatggttggtaacagaaaagaattataagatacattgtcctcaagaaacagatgatctccttaagctgcaagtgtacatgacagaagagaacaagaaagtatattattaaacgctagtggtatagtatgaactctaaatccataaaaatttggggatcagggtaaacacgaaagacttcattaattacaactgtggaggtgttaagcatttgtgtctgggaagtaaggggaaataagattggaaactaggatagggccagattatgagacctttaaatggaagagtttggccttgctctggtacaggatgggcagctagtgctgatccttgactaagggagtggtataatcattggggcattttaggaaaaaattaatctagcggtggagtatcagagaatatcaagagttcactctagttcaacctcccactttgcagatgggaaaagagagtcctctctggccttgtgcaagtttgtacagcaagtaacaggccagaatcagaacctcttttgcccagtgttctgccagatggacagggtagcagggagtctacagaagaagcagaataagccagcagtgaggtgatgagtgtccagagcaagtcttttgatttaaggaagctcatggggctcaaagtgttgtaatcaggacctaattggagttgtctggccagtgaaagacaactctcattctcagggcaaagttggttaatgaaatgaatgaaatgagctccagctcagttactctgagctccagcaagaaagcaggggagtaagctttggaatggagatcaccagattctgtaaagtgctttctgttatgtctttcagaaaatggacaaaaataaagatggcatcgtaactttagatgaatttcttgaatcatgtcaggaggtaaggagagatctcagggcacaataactctacatctgggaaaggaaacctggggcctggggacctgcagaaggaaggtgatgagaaacctgcacatacctgcaacccctcccatcagagccaacaacaccagcaacaactgtgaagtccacagttccactcctcaacctgacctgcagttggtcttggctaagcacaagactgaacagagagcctaagtaggggtctgggggcatgtgaaaactcagagggggtctctgtgaaaatagacttcccgagagggcaacaccattattttttagcctgcctctggcttgatgacccatttcccagactacaaggaagcagctggggggaaaaaaacctacaattgtgtgattctcaaaccacagtgtgcataaaaattgcctggaatgattctgaaaatgcatatttccaggcctcaatcccagagactctagatctgggtcactttaacacaaatgtcctggaccaatgcttctaacactttaatgtgtgaaacaatatccttgatgattttgttaaaatgcagattctaattccataggtctggggtagggcctgagatgttacttttctcacattctccccagtcacactggtgatgctgatcctgggaacacaactttcattaagtctaaccaatagaccagccccagagtccaccagagactgaactggaaataattgcttcatctacttttgagaaatccatttgtacccccacattattttagaaatgttcagagttactctgagctccagccaagaagaatagcaaatgtaagaaagccggggagaagttcctagcagatactgagccccc

SEQ ID NO: 239 - DNA, 1002 bp, homo sapiens; identical to SEQ ID NO: 137

SEQ ID NO: 240 - DNA, 1002 bp, homo sapiens
actttgaactgatcactttctaggtccccacccttacttcttgtttttcatacccttgtagagttttctccatataggaaacccatgcttgacatttgctcaccagagttacagagctctcagggaggagactcagagttctaaccctcttgccctccttttttcccaggacgacaacatcatgaggtctctccagctgtttcaaaatgtcatgtaactggtgacactcagccattcagctctcagagacattgtactaaacaaccaccttaacaccctgatctgcccttgttctgattttacacaccaactcttgggacagaaacaccttttacactttggaagaattctctgctgaagactttctatggaacccagcatcatgtggctcagtctctgattgccaactcttcctctttcttcttcttgagagagacaagatgaaatttgagtttgttttggaagcatgctcatctcctcacactgctgccctatggaaggttccctctgcttaagcttaaacagtagtgcacaaaatatgctgcttacgtgcccccagcccactgcctccaagtcaggcagaccttggtgaatctggaagcaagaggacctgagccagatgcacaccatctctgatggcctcccaaaccaatgtgcctgtttctcttcctttggtgggaagaatgagagttatccagaacaattaggatctgtcatgaccagattgggagagccagcacctaacatatgtgggataggactgaattattaagcatgatattgtctgatgacccaaactgcccatgtcatttgtttccagaaacgaggaccaataattctctcacactggcatttgtgctggtagtacaagtcctttaatatgtccaggaagggagccattgcccagtggtccatatctccaccacatcccctgcttgagcccagcgctgcatgtccctcccaagaagtccagaatgcctgcaaattgctgtaattttatac

SEQ ID NO: 241 - DNA, 1002 bp, homo sapiens
ctgatctgcccttgttctgattttacacaccaactcttgggacagaaacaccttttacactttggaagaattctctgctgaagactttctatggaacccagcatcatgtggctcagtctctgattgccaactcttcctctttcttcttcttgagagagacaagatgaaatttgagtttgttttggaagcatgctcatctcctcacactgctgccctatggaaggtccctctgcttaagcttaaacagtagtgcacaaaatatgctgcttacgtgcccccagcccactgcctccaagtcaggcagaccttggtgaatctggaagcaagaggacctgagccagatgcacaccatctctgatggcctcccaaaccaatgtgcctgtttctcttcctttggtgggaagaatgagagttatccagaacaattaggatctgtcatgaccagattgggagagccagcacctaacatatgtgggataggactgaattattaagcatgactattgtctgatgacccaaactgcccatgtcatttgtttccagaaacgaggaccaataattctctcacactggcatttgtgctggtagtacaagtcctttaatatgtccaggaagggagccattgcccagtggtccatatctccaccacatcccctgcttgagcccagcgctgcatgtccctcccaagaagtccagaatgcctgcaaattgctgtaattttataccatgttctaaccaataaacagaactatttcttacactctcaatcacttcttcatgactccgttaggtaagagaggtaagctgtgaaaagggaaggctagtccattcatttgacacccaattattagtgcagttgtccctccatatgtgtgaaggatcagtcccaggactctccataccaaaatctgcagatactcaagtcccacagctagccctgagggactcgtgttttcagaaaatttggcctccatatatgcaggtttcacatcctataaatac

SEQ ID NO: 242 - DNA, 200 bp, homo sapiens
cccaagctcaaccattccaatgccatctcctctggttccagataagattgaagatgagctggagatgaccatggtttgccatcggcccgagggactggagcagctcgaggcccagaccaacttcaccaagagggagctgcaggtcctttatcgaggcttcaaaaatgtaagacccgtgcacgctctgaaggcctgggggg

SEQ ID NO: 243 - DNA, 200 bp, homo sapiens
ttgtctaccatctcctctctaagaagggctcccacaatatatccccttctgcttgcttctaactccctatcacctgctaaagaaggacctcaccttttaatcactttcattgccaaggggcacaaggagccccaaactctgtcacctaggaagagcttgacctcatggtttccacactgtgtgcttttatgtccctgctc

SEQ ID NO: 244 - DNA, 200 bp, homo sapiens
accctcaatacagactgttcctacagtccacgtcctcagccactagaccatacggccactgggatgatagacagaccactgcagccatggataaggcaaaaacagggctggctgtgttgatctgtgtctctcagagctccattcttcctcaagggggcaccttgcaaaaaaaaacaaaaaaatggggcagggtagggaac

SEQ ID NO: 245 - DNA, 200 bp, homo sapiens
gccactgggatgatagacagaccactgcagccatggataaggcaaaaacagggctggctgtgttgatctgtgtctctcagagctccattcttcctcaagggggcaccttgcaaaaaaaaacaaaaaaatggggcagggtagggaactgaaggcaggagctcttcacagagcatagccacatcctccaggcagacaagagg

SEQ ID NO: 246 - DNA, 403 bp, homo sapiens
ggcaaaaacagggctggctgtgttgatctgtgtctctcagagctccattcttcctcaagggggcaccttgcaaaaaaaaacaaaaaaatggggcagggtagggaactgaaggcaggagctcttcacagagcatagccacatcctccaggcagacaagaggacgcaggaggcaccattctgtgagagtatcacagtctgacctcaaagacacagcttcacactgtctgatggcttgatggttaatgtcactctgccttttccccttctcaggactttgtaaccgctctgtcgattttattgagaggaactgtccacgagaaactaaggtggacatttaatttgtatgacatcaacaaggacggatacataaacaaagaggtaagtgagctggggccaggggtgt

SEQ ID NO: 247 - DNA, 403 bp, homo sapiens
gacaagaggacgcaggaggcaccattctgtgagagtatcacagtctgacccaaagacacagcttcacactgtctgatggcttgatggttaatgtcactctgccttttccccttctcaggactttgtaaccgctctgtcgattttattgagaggaactgtccacgagaaactaaggtggacatttaatttgtatgacatcaaccaaggacggatacataaacaaagaggtaagtgagctggggccaggggtgtgagagggctccagtgaaggtaactaacccaacagaaaacagccccaggcatgaggatagcactgtctgaatgaggcaggctctgctttggggctaacagagctggtccctggcaaaataaagaaggcctccctcattgccctaccctgccc

SEQ ID NO: 248 - DNA, 1781 bp, homo sapiens
ccaccagggtcccttccaactcacggagcctatggtactgaatggcagccaggttttttatggagcaatagctggacttcacatttgcataatgccttgcagtttcactgttaagagtactgcattgtattctaattatatgaatctcggtcattcctttatgacatttctgaggaatactatctcaatcaagaaaagccctaattgcactcctctcctatcccggtgagagagcacagactcgtgcctgctccgcaggggtggaggctggaattcagtagtctgagtcggggatgcctggagcaggaggtggtcaggggcattgtcctttccaagtcaggaaggcagacagcacctgctgttggtgccaaggttactggacaggctgcgagggctctgtctgtctgtccgatgttcacaggccagctccccggaggctcagcactcagcccagcttctccgagatgcaaaccaggccactctgaggctgcctacaaactttctgctgagtgccgacagctgcttcctgctctgcggggagttcttccagatcctgatcaaggcacagagaattgatctatcagattaaccaggaaggaaagagtgggagagcgagtgtgggaggctgtggggctgagtgttttctgcgtagcagtcccctcccttctgacttgagtattaattgctacattaccgctgccatgtaagaaagacagtcagcaaagcctgggagagctccagctcctccctccctgctctgctcaacttcactctcctcctcggttcccttggagtaccttgtgccccggcagtgctgtcccggccctggcatcctgaggtcctcccgtggtgaggacttaagtggacacgcaggagtgggtggagagagggagggagagtttgccctgcaggctctctggatgcagaagccagactcgctgcagaggcagctgtgctgttcccggagcctggcttcaggggtgcatccgtcactcagggttcattcacccaggcaggctccaagttcctggggtgcacaaggtgggcactgtcccttctgggtgctgacagcagagcctggctcccctccgccaccatgagcggctgctccaaaagatgcaagcttgggttcgtgaaatttgcccagaccatctttaagctcatcactgggaccctcagcaaaggtatggaaactggccttgacccttgctttctgtcttgatatggcctggctggtcgcattgcctcggtgtggtgagcgtgaccattctggtgcacccaggtcttggaaaaagctggggaaattggtggctgggattcgaggttgctgacaacctgcgtcctggctttgagtaggcgggcacccagccagggaactcagctggctgtaattgcctggaactttggaaatggagttggtggtgtgtggctgatacgttatgggcgggcagagggatagaaccctttccagagcattggaagtggcttagcgtgactggagtttcaagaagttatccatggaaggttgtattttgttgataaaagagagatttgatgcagtgggttgtgagtaattctgcagaacagagacgcttgagggggccagtgggaggtggtgatgggccggcatctgctttgccctggtggcttcagaaaccggatcagctctgcacctcaagtgccaagagcctcctctcatagggttccagcgtctcgtgcttctggggcttcattcatcgttctgctttcttggatccctgtccctccacatttcatgccta

SEQ ID NO: 249 - DNA, 833 bp, homo sapiens
caaggcacagagaattgatctatcagattaaccaggaaggaaagagtgggagagcgagtgtgggaggctgtggggctgagtgttttctgcgtagcagtcccctcccttctgacttgagtattaattgctacattaccgctgccatgtaagaaagacagtcagcaaagcctgggagagctccagctcctccctccctgctctgctcaacttcactctcctcctcggttcccttggagtaccttgtgccccggcagtgctgtcccggccctggcatcctgaggtcctcccgtggtgaggacttaagtggacagcaggagtgggtggagagagggagggagagtttgccctgcaggctctctggatgcagaagccagactcgctgcagaggcagctgtgctgttcccggagcctggctttcaggggtgcatccgtcactcagggttcattcacccaggcaggctccaagttcctggggtgcacaaggtgggcactgtcccttctgggtgctgacagcagagcctggctcccctccgccaccatgagcggctgctccaaaagatgcaagcttgggttcgtgaaatttgcccagaccatctttaagctcatcactgggaccctcagcaaaggtatggaaactggccttgacccttgctttctgtcttgatatggcctggctggtcgcattgcctcggtgtggtgagcgtgaccattctggtgcacccaggtcttggaaaaagctggggaaattggtggctgggattcgaggttgctgacaacctgcgtcctggctttgagtaggcgggcacccagccagggaactcagctggctgtaa

SEQ ID NO: 250 - DNA, 857 bp, homo sapiens
acagagaattgatctatcagattaaccaggaaggaaagagtgggagagcgagtgtgggaggctgtggggctgagtgttttctgcgtagcagtcccctcccttctgacttgagtattaattgctacattaccgctgccatgtaagaaagacagtcagcaaagcctgggagagctccagctcctccctccctgctctgctcaacttcactctcctcctcggttcccttggagtaccttgtgccccggcagtgctgtcccggccctggcatcctgaggtcctcccgtggtgaggacttaagtggacagcaggagtgggtggagagagggagggagagtttgccctgcaggctctctggatgcagaagccagactcgctgcagaggcagctgtgctgttcccggagcctggcttcaggggtgcatccgtcactacagggttcattcacccaggcaggctccaagttcctggggtgcacaaggtgggcactgtcccttctgggtgctgacagcagagcctggctcccctccgccaccatgagcggctgctccaaaagatgcaagcttgggttcgtgaaatttgcccagaccatctttaagctcatcactgggaccctcagcaaaggtatggaaactggccttgacccttgctttctgtcttgatatggcctggctggtcgcattgcctcggtgtggtgagcgtgaccattctggtgcacccaggtcttggaaaaagctggggaaattggtggctgggattcgaggttgctgacaacctgcgtcctggctttgagtaggcgggcacccagccagggaactcagctggctgtaattgcctggaactttggaaatggagttggtg

SEQ ID NO: 251 - DNA, 890 bp, homo sapiens
tggcccaccttcagggtcatgaggattcataaaccctattctgcgaagtgcctccaggaatcatcaagggagctagggcagctctgagtctccaccaggcccaccctccgcctctcagggctgagcttcacttcccttcccaaaggggccagggagaggggctgctgatgacatgatctcagaggaaggccaaggcctccaggctgcctctgggcctggcacaggaaggaggaggagaaaatagggagcccaaggaaagatcaacccagcccagcccaaggacccccagccccagccccagccccagctgggctcaaactaattgaaaacagactggaaaaggctgcttttgcccttcctctagactcagcatcatcaagactggagggacagagcatttgaatcatcagacgctgggccagactgtcaccccacgcgttttctcattttatcgtcctaagaagcccagaaggtgcgtaaaatggcctgtcccaaacagatgaggacattacctttctcctcttcctcctcctccttcttcttcttcttctttttgcttcatttttctttcattttttcccccagatgttgcatttcagagaggctgagcgtgttgactaaggtcacacagctacaaacatcagggacctgcgaaaaagctctgttccctggtgacaggtgttctgtgatcctaacacagccggaggtggggacaacgtccttgcagtaacaaaggccctgttgctcaactcagtggacatcaggccctgttttcattcattagcaggtcagggattccagtgtcacctgtgccatgtattccagctgatctacctgcaagcctctactccccattttcccagcagcagccgcagacaccacccaactgg

SEQ ID NO: 252 - DNA, 943 bp, homo sapiens
gggtcatgaggattcataaaccctattctgcgaagtgcctccaggaatcatcaagggagctagggcagctctgagtctccaccaggcccaccctccgcctctcagggctgagcttcacttcccttcccaaaggggccagggagaggggctgctgatgacatgatctcagaggaaggccaaggcctccaggctgcctctgggcctggcacaggaaggaggaggagaaaatagggagcccaaggaaagatcaacccagcccagcccaaggacccccagccccagccccagccccagctgggctcaaactaattgaaaacagactggaaaaggctgcttttgcccttcctctagactcagcatcatcaagactggagggacagagcatttgaatcatcagacgctgggccagacgtcaccccacgcgttttctcattttatcgtcctaagaagcccagaaggtgcgtaaaatggcctgtacccaaacagatgaggacattacctttctcctcttcctcctcctccttcttcttcttcttctttttgcttcatttttctttcattttttcccccagatgttgcatttcagagaggctgagcgtgttgactaaggtcacacagctacaaacatcagggacctgcgaaaaagctctgttccctggtgacaggtgttctgtgatcctaacacagccggaggtggggacaacgtccttgcagtaacaaaggccctgttgctcaactcagtggacatcaggccctgttttcattcattagcaggtcagggattccagtgtcacctgtgccatgtattccagctgatctacctgcaagcctctactccccattttcccagcagcagccgcagacaccacccaactggcagaaatttcaaacaaggggttctgccttgcactccggtgcaagggttgggcacgtggactcacat

SEQ ID NO: 253 - DNA, 841 bp, homo sapiens
cacaaaacaaatccgggactttaagcctgatctgcttgacctgaaactcatatctacttccctgccctctgaagatctatatgtcctatgtcatcacttcactgttcacacaaggtgatacctggcttctccaagcacctgctaccctgaacttactgcaccactctttccttcctagcctgaatgcaatttgcaatgaggagatgatttgattttcttcagccctagacctccagcttcctgagagcaggtactcttgcctcttcttgctcattattgatccatatatttagaatagcgcctggcaggtagatggtgcttaataaatattcattgaataaatgaatgaatgaatgatccaatgagccccaaagcaaataacaataaaggacatttgcagagtgctctacagagagacaagtgctttccctttagctttatcttaccccattctcacaacaatcccctgacatgattgggttcatgtttcacagatgaggaggctaacggccaggtgtacataccaggggacatgggactgggttcatatgagctcaggggtaaatgatgacaccctttcccctgccctgaaggatctcagtttgagtatttgtagcacacttaggatgttctgggccaggctgagtggcggtggatgggggcggtggaggtggggtatgcaaagcaggaaactcggcctttgctttctaaaagctcccagtctatttgaggccagacttatgcatgcagaacatttgggaaatggtacaagacagcagcaagcatagtgctgaattgcacataatcaggtgccaactgcattcccttccttaactaatct

SEQ ID NO: 254 - DNA, 895 bp, homo sapiens
aactttctcctcagcaaagagctctcctctgttccctgaatcctggatatcccactgggtcctctagtgaccccaagcttcagcctcgcatgccctcttctcgaacagagaaggcaggagggaagcagggaccagcccctgctccatcttccaggattccaggcctccctggcctggacaagccctgagctggcagttaggagagcagaggttgtgaatctggtgggacccccagcaggtctttctggctcagtgccctcatctgtgagcaggggttccccaggagaccacgacagaggcctggaacccaagttctaatcccacatcctggctgggcaacttcaggcaaatttctaacacaaggtaagcctcaatttctctctggggtaatgatcaggcacctgcttaattcacaggggtttggtgggcatcactgtggacaatgtggttgcacagcagtgggcaatgcaaaggaaaggaagtatgttagtaagtgcccctcccctgttgcacaaaacaggacacatgctgggattgcagaaaagcaataaatgctgcacaggtgaagaaaactattcaaggaccctggccaagtcacaggctacctgtggccctgaggggacagctcatgggttggcattaggggaagcagctctcaaggggcctgtatcctggggattcaactctgtgcctatgtggcattgagcctgtgtgaatgtggtgactgtcatgctgttttgctgtgtgtgcgtctgcatgcctgtgtgtttgtgtgtctctccaccttcgtggggggcaactgtaggtgtattatgagccttgggtctgtctgtgtgtacaatagcaatgtctgtgcggacttaaggacctgcgcccatatgtttgtgggactttc

SEQ ID NO: 255 - DNA, 890 bp, homo sapiens
cagagaaggcaggagggaagcagggaccagcccctgctccatcttccaggattccaggcctccctggcctggacaagccctgagctggcagttaggagagcagaggttgtgaatctggtgggacccccagcaggtctttctggctcagtgccctcatctgtgagcaggggttccccaggagaccacgacagaggcctggaacccaagttctaatcccacatcctggctgggcaacttcaggcaaatttctaacacaaggtaagcctcaatttctctctggggtaatgatcaggcacctgcttaattcacaggggtttggtgggcatcacgtggacaatgtggttgcacagcagtgggcaatgcaaaggaaaggaagtatgttagtaagtgcccctcccctgttgcacaaaacaggacacatgctgggattgcagaaaagcaataaatgctgcactaggtgaagaaaactattcaaggaccctggccaagtcacaggctacctgtggccctgaggggacagctcatgggttggcattaggggaagcagctctcaaggggcctgtatcctggggattcaactctgtgcctatgtggcattgagcctgtgtgaatgtggtgactgtcatgctgttttgctgtgtgtgcgtctgcatgcctgtgtgtttgtgtgtctctccaccttcgtggggggcaactgtaggtgtattatgagccttgggtctgtctgtgtgtacaatagcaatgtctgtgcggacttaaggacctgcgcccatatgtttgtgggactttctgggcatgcatgcttgtttatgaggccatacatccgggtattctgtgaactgctagcatggtgtgtatctgtgtggcagacagaaaatggctgggtggga

SEQ ID NO: 256 - DNA, 1002 bp, homo sapiens
atctcagcactttgggaggccaaggcgggtggatcacctgaggtcaggagttcaagcccagccagcccaacatggcgaaaccccgtctctattaaaaaatacaaaaaaatttagctgggcctagtggtgggcgcctgtaatcccagctactccggaggctgaggcaggagaatcgcttgaatctgggaggcagaggttgcagtgagcagagatcgcaccactgcactccagcctgggcaacagagcgagactccgtctcaaaaaaaaaaaaaaaagaaaaagaaaaatgagagtgtaagggcccagaggggctgagggctcctttctcctccccaactccctgtcactagaaggtgggccctgccataggaggattctgcagaaccctcaaggacccgcggagcaggacggcaccttcttcccatgaccacccatttggatgtgtttttcacccctttctgggtggggcagactttccccctccccatgagttcaggcaggtgggttaaataagatttcccttgaagtcgaatgaaatcacaatgcaccacacacagggacacacacacacacacacgcacgcacgcacatcacacacacacacacacacacacacacacacacacacacatacacacacacagtctccctggggccaatctactgccccctgaacctcacccatcagccaggtgcctggccccgggtctgtctcttagggttacatgctcccggggctcccgcacataccccggcagatgagggtgcgcaggggtgagggcgcagggctgggcgtcccccgcccccaccgtgcagccctcgcccccgccccgcccctccgtagttgcccgcccgccgccccctccgccgccccctccgccgctccgactctcgccccgagcgctggcagcaggcagcaggcagcaggcgggcgcgctgtggctccgcgccgcgcggtccgggctctgttcattcatgattggtactcggccctccgagacc

SEQ ID NO: 257 - DNA, 821 bp, homo sapiens
agcactcctggggctcattgttaagtttataaaactcagagctgatgagttgtgtgcactgtgtgggtctgagtgggcttatgactcccctccaagcctggctgtaagaatctaagacttaaagctgaaggaccaaatgggactttctgtcccatcccctctctgctccatgcaagcaccaactgtggatttttgcccctaattatattagggaacgctgtcaatcaaaaagatgatgttaaactcatccagaacaaaccaaaccatgtttaaggggaagaaaagattacatcttcaaatgccagcatgccatcattaatacaatgtctaatgtagtcaatatagttcaggcaacattgaaaatgaaccactgcaaatactaggaatacaatttcaagaggaagcacaacattctgtgtttctatgcacacagtcctgtaaattatttgcagctcaagtatgtcatgttcttttaaattttcccctgggtacagcttgaacaacttcctacaagtgttgatatgtcatattctcattatcatttagttcaaaattaccatgatttaattaccatgaggttgcttttttgatacatgagttacttagaaattgaattaggctaggcatggtggcttccacctataatcctagcactttggaaggccaaggcaggaggattgcttgagtttgaggccagtctaggcaatatagtgagacctcatctccccaaaagtacaaaaaaactagccaggcatggggacacatgcctatagttccagctactcaaaggctgaggtggggaggattgctttgagcctggg

SEQ ID NO: 258 - DNA, 573 bp, homo sapiens
gccagctatccccagagacatcacaggagaaggagcagaagctggaacatcatccgggagctggactagaacgtcccgggaaacttcagcctggcttctgctttgtcccgaaaacccaggggctccagctccagggctgtgtcttagaatgaggcagtttatctgttcagggcttctcttagtttttaatcccaataggacacactgttgtattaaaaagccatgcgagatggaagaaggaaattgaatgaaatttgagggcaggtaggagcagagacaataaataattcagcagtgaaggaagcagaaaaaagattgcactcatttcgcccttcaacaattatactaaacacctgctctgggccacagaagggccagatcccattcctgtgctcaggaagcccacaggccggcagggagaggctggttggaatgtgtgctttgcactgtaacggaggcatcgagcatggtaagggactggcggtgactgctgcctgcggacgtcgagacaggggcctttgaagaggcaggacctgtctggagtcttacctgggccttggcctggcaatgggg
